United States Patent Application Publication US 2025/0302929 A1 - sequence listing, part 7

SEQ ID NO: 40884 - protein, 715 aa, Artificial Sequence
  Synthetic polypeptide
SQLLRRLRYLKEFRTEQCPLFSQHKCAQHRPFTCFHWHFLNQRRRRPLRRRDGTFNYSPDVYCSKYNEATGVCPDGDECPYLHRTTGDTERKYHLRYYKTGTCIHETDARGHCVKNGLHCAFAHGPLDLRPPVCDVRELQAQEALQNGQLGGGEGVPDLQPGVLASQAMIEKILSEDPRWQDANFVLGSYKTEQCPKPPRLCRQGYACPHYHNSRDRRRNPRRFQYRSTPCPSVKHGDEWGEPSRCDGGDGCQYCHSRTEQQFHPEIYKSTKCNDMRQTGYCPRGPFCAFAHVEKSLGMVNEWGCHDLHLTSPSSTGSGQPGNAKRRDSPAEGGPRGSEQDSKQNHLAVFAAVHPPAPSVSSSVASSLASSAGSGSSSPTALPAPPARALPLGPASSTVEAVLGSALDLHLSNVNIASLEKDLEEQDGHDLGAAGPRSLAGSAPVAIPGSLPRAPSLHSPSSASTSPLGSLSQPLPGPVGSSAMTPPQQPPPLRSEPGTLGSAASSYSPLGLNGVPGSIWDFVSGSFSPSPSPILSAGPPSSSSASPNGAELARVRRQLDEAKRKIRQWEESWQQVKQVCDAWQREAQEAKERARVADSDRQLALQKKEEVEAQVKQLQEELEGLGVASTLPGLRGCGDIGTIPLPKLHSLQSQLRLDLEAVDGVIFQLRAKQCVACRERAHGAVLRPCQHHILCEPCAATAPECPYCKGQPLQW

SEQ ID NO: 40885 - protein, 662 aa, Artificial Sequence
  Synthetic polypeptide
SQLLRRLRYLKEFRTEQCPLFSQHKCAQHRPFTCFHWHFLNQRRRRPLRRRDGTFNYSPDVYCSKYNEATGVCPDGDECPYLHRTTGDTERKYHLRYYKTGTCIHETDARGHCVKNGLHCAFAHGPLDLRPPVCDVRELQAQEALQNGQLGGGEGVPDLQPGVLASQAMIEKILSEDPRWQDANFVLGSYKTEQCPKPPRLCRQGYACPHYHNSRDRRRNPRRFQYRSTPCPSVKHGDEWGEPSRCDGGDGCQYCHSRTEQQFHPESTKCNDMRQTGYCPRGPFCAFAHVEKSLGMVNEWGCHDLHLTSPSSTGSGQPGNAKRRDSPAEGGPRGSEQDSKQNHLAVFAAVHPPAPSVSSSVASSLASSAGSGSSSPTALPAPPARALPLGPASSTVEAVLGSALDLHLSNVNIASLEKDLEEQDGHDLGAAGPRSLAGSAPVAIPGSLPRAPSLHSPSSASTSPLGSLSQPLPGPVGSSAMTPPQQPPPLRSEPGTLGSAASSYSPLGLNGVPGSIWDFVSGSFSPSPSPILSAGPPSSSSASPNGAELARVRRQLDEAKRKIRQWEESWQQVKQVCDAWQREAQEAKERARVADSDRQLALQKKEEVEAQVIFQLRAKQCVACRERAHGAVLRPCQHHILCEPCAATAPECPYCKGQPLQW

SEQ ID NO: 40886 - protein, 259 aa, Artificial Sequence
  Synthetic polypeptide
SQLLRRLRYLKEFRTEQCPLFSQHKCAQHRPFTCFHWHFLNQRRRRPLRRRDGTFNYSPDVYCSKYNEATGVCPDGDECPYLHRTTGDTERKYHLRYYKTGTCIHETDARGHCVKNGLHCAFAHGPLDLRPPVCDVRELQAQEALQNGQLGGGEGVPDLQPGVLASQAMIEKILSEDPRWQDANFVLGSYKTEQCPKPPRLCRQGYACPHYHNSRDRRRNPRRFQYSWQLGRRVLRLSPRANNPRVALPRVHTGPSSTA

SEQ ID NO: 40887 - protein, 738 aa, Artificial Sequence
  Synthetic polypeptide
SQLLRRLRYLKEFRTEQCPLFSQHKCAQHRPFTCFHWHFLNQRRRRPLRRRDGTFNYSPDVYCSKYNEATGVCPDGDESLLGVLYPLWAPPPVPAPVGAPTVHPFLARWFSHVPWEPAGSADPRASSTPAGGTTWATGLLGDFDACGSQSRECVKGVWWTLLGFRCPYLHRTTGDTERKYHLRYYKTGTCIHETDARGHCVKNGLHCAFAHGPLDLRPPVCDVRELQAQEALQNGQLGGGEGVPDLQPGVLASQAMIEKILSEDPRWQALLPVALLRHRVAHFSDANFVLGSYKTEQCPKPPRLCRQGYACPHYHNSRDRRRNPRRFQYRSTPCPSVKHGDEWGEPSRCDGGDGCQYCHSRTEQQFHPEGPVGSPVSGAFSVFSHAGLVADPSLWYPAEWSWHHVGHSRTINPEGDKPSRLGPAPENIKRGNDFACDGRADAAGMAPHVCVFPIYKSTKCNDMRQTGYCPRGPFCAFAHVEKSLGMVNEWGCHDLHLTSPSSTGSGQPGNAKRRDSPAEGGPRGSEQDSKQGVRAHGVYVFEQNHLAVFAAVHPPAPSVSSSVASSLASSAGSGSSSPTALPAPPARALPLGPASSTVEAVLALEPTPSSPTSSAVQGVAGELGMGSGGQGCWSHVVGALAAVPAWTHSGDLEWDPSTIRTRVNVGGGPAARPAMTLAREPQLLVVGGCPTRNCSGPAASPQQLLDDAGQGGRGERDSSQRPLRPQTTHRQDTRPVPS

SEQ ID NO: 40888 - protein, 143 aa, Artificial Sequence
  Synthetic polypeptide
EKAWIYHSLTRCWIRDSLVSYITNLGLFSLVFLFNMAMLATMVVQILRLRPHTQKWSHVLTLLGLSLVLGLPWALIFFSFASGTFQLVVLYLFSIITSFQGFLIFIWYWSMRLQARGGPSPLKSNSDSARLPISSGSTSSSRI

SEQ ID NO: 40889 - protein, 149 aa, Artificial Sequence
  Synthetic polypeptide
ESWRVRKGLDLPLTHQVLDPGLPGQLHHQPGPLQPGVSVQHGHASHHGGADPAAAPPHPKVVTCADTAGPQPGPWPALGLDLLLLCFWHLPACRPLPFQHHHLLPRLPHLHLVLVHAAAGPGWPLPSEEQLRQRQAPHQLGQHLVQPHL

SEQ ID NO: 40890 - protein, 48 aa, Artificial Sequence
  Synthetic polypeptide
STGLRVMEGEKRPGSTTHSPGAGSGTPWSATSPTWASSAWCFCSTWPC

SEQ ID NO: 40891 - protein, 19 aa, Artificial Sequence
  Synthetic polypeptide
CQHFGSPRRTDHLSNQIFL

SEQ ID NO: 40892 - protein, 69 aa, Artificial Sequence
  Synthetic polypeptide
GWAQWLTPVIPALWEAEFPRRPGRDPRTDRGGISVHNIPGQGDHVSRFHKAAIYRRRRPAAPEKETHWK

SEQ ID NO: 40893 - protein, 23 aa, Artificial Sequence
  Synthetic polypeptide
MGSVAHACNPSTLGGRVSEEAWT

SEQ ID NO: 40894 - protein, 433 aa, Artificial Sequence
  Synthetic polypeptide
SQHFGRPSFRGGLDVTHGQTGVESVYTTFRDREIMFHVSTKLPFTDGDAQQLQRKRHIGNDIVAIIFQEENTPFVPDMIASNFLHAYIVVQVETPGTETPSYKVSVTAREDVPTFGPPLPSPPVFQKGPEFREFLLTKLTNAENACCKSDKFAKLEDRTRAALLDNLHDELHAHTQAMLGLGPEEDKFENGGHGGFLESFKRAIRVRSHSMETMVGGQKKSHSGGIPGSLSGGISHNSMEVTKTTFSPPVVAATVKNQSRSPIKRRSGLFPRLHTGSEGQGDSRARCDSTSSTPKTPDGGHSSQEIKSETSSNPSSPEICPNKEKPFMKLKENGRAISRSSSSTSSVSSTAGEGEAMEEGDSGGSQPSTTSPFKQEVFVYSPSPSSESPSLGAAATPIIMSRSPTDAKSRNSPRSNLKFRFDKLSHASSGAGH

SEQ ID NO: 40895 - protein, 22 aa, Artificial Sequence
  Synthetic polypeptide
ARMAPLHSPAWTTELAERLMTS

SEQ ID NO: 40896 - protein, 97 aa, Artificial Sequence
  Synthetic polypeptide
TWEMEVAVSQDGATAFSSLDDRAGREADDIVNWLKKRTGPAATTLPDGAAAESLVESSEVAVIGFFKDVESDSAKQFLQAAEAIDDIPFGITSNSDV

SEQ ID NO: 40897 - protein, 182 aa, Artificial Sequence
  Synthetic polypeptide
TWEMEVAVSQDGATAFSSLDDRAGREADDIVNWLKKRTGPAATTLPDGAAAESLVESSEVAVIGFFKDVESDSAKQFLQAAEAIDDIPFGITSNSDVFSKYQLDKDGVVLFKKFDEGRNNFEGEVTKENLLDFIKHNQLPLVIEFTEQTAPKIFGGEIKTHILLFLPKSVSDYDGKLSNFKT

SEQ ID NO: 40898 - protein, 413 aa, Artificial Sequence
  Synthetic polypeptide
TWEMEVAVSQDGATAFSSLDDRAGREADDIVNWLKKRTGPAATTLPDGAAAESLVESSEVAVIGFFKDVESDSAKQFLQAAEAIDDIPFGITSNSDVFSKYQLDKDGVVLFKKFDEGRNNFEGEVTKENLLDFIKHNQLPLVIEFTEQTAPKIFGGEIKTHILLFLPKSVSDYDGKLSNFKTAAESFKGKILFIFIDSDHTDNQRILEFFGLKKEECPAVRLITLEEEMTKYKPESEELTAERITEFCHRFLEGKIKPHLMSQELPEDWDKQPVKVLVGKNFEDVAFDEKKNVFVEFYAPWCGHCKQLAPIWDKLGETYKDHENIVIAKMDSTANEVEAVKVHSFPTLKFFPASADRTVIDYNGERTLDGFKKFLESGGQDGAGDDDDLEDLEEAEEPDMEEDDDQKAVKDEL

SEQ ID NO: 40899 - protein, 40 aa, Artificial Sequence
  Synthetic polypeptide
YQLFGRPRQENHLNLGDGGCSEPGWRHCILQPGRQSWQRG

SEQ ID NO: 40900 - protein, 69 aa, Artificial Sequence
  Synthetic polypeptide
KWLGTNCIKKICHFPLHKRSEDIVKEKTHISNCNKQTKHLKINFKRNGQDLNEGNFTVLLQKRKEDLNN

SEQ ID NO: 40901 - protein, 1546 aa, Artificial Sequence
  Synthetic polypeptide
RQLYSAAAKKKRRLEQLNSFEQLCINYTNEKLQQLFNHTMFILEQEEYQREGIEWNFIDFGLDLQPCIDLIERPANPPGVLALLDEECWFPKATDKTFVEKLVQEQGSHSKFQKPRQLKDKADFCIIHYAGKVDYKADEWLMKNMDPLNDNVATLLHQSSDRFVAELWKDEIQNIQRASFYDSVSGLHEPPVDRIVGLDQVTGMTETAFGSAYKTKKGMFRTVGQLYKESLTKLMATLRNTNPNFVRCIIPNHEKRAGKLDPHLVLDQLRCNGVLEGIRICRQGFPNRIVFQEFRQRYEILTPNAIPKGFMDGKQACERMIRALELDPNLYRIGQSKIFFRAGVLAHLEEERDLKITDIIIFFQAVCRGYLARKAFAKKQQQLSALKVLQRNCAAYLKLRHWQWWRVFTKVKPLLQVTRQEEELQAKDEELLKVKEKQTKVEGELEEMERKHQQLLEEKNILAEQLQAETELFAEAEEMRARLAAKKQELEEILHDLESRVEEEEERNQILQNEKKKMQAHIQDLEEQLDEEEGARQKLQLEKVTAEAKIKKMEEEILLLEDQNSKFIKEKKLMEDRIAECSSQLAEEEEKAKNLAKIRNKQEVMISDLEERLKKEEKTRQELEKAKRKLDGETTDLQDQIAELQAQIDELKLQLAKKEEELQGALARGDDETLHKNNALKVVRELQAQIAELQEDFESEKASRNKAEKQKRDLSEELEALKTELEDTLDTTAAQQELRTKREQEVAELKKALEEETKNHEAQIQDMRQRHATALEELSEQLEQAKRFKANLEKNKQGLETDNKELACEVKVLQQVKAESEHKRKKLDAQVQELHAKVSEGDRLRVELAEKASKLQNELDNVSTLLEEAEKKGIKFAKDAASLESQLQDTQELLQEETRQKLNLSSRIRQLEEEKNSLQEQQEEEEEARKNLEKQVLALQSQLADTKKKVDDDLGTIESLEEAKKKLLKDAEALSQRLEEKALAYDKLEKTKNRLQQELDDLTVDLDHQRQVASNLEKKQKKFDQLLAEEKSISARYAEERDRAEAEAREKETKALSLARALEEALEAKEEFERQNKQLRADMEDLMSSKDDVGKNVHELEKSKRALEQQVEEMRTQLEELEDELQATEDAKLRLEVNMQAMKAQFERDLQTRDEQNEEKKRLLIKQVRELEAELEDERKQRALAVASKKKMEIDLKDLEAQIEAANKARDEVIKQLRKLQAQMKDYQRELEEARASRDEIFAQSKESEKKLKSLEAEILQLQEELASSERARRHAEQERDELADEITNSASGKSALLDEKRRLEARIAQLEEELEEEQSNMELLNDRFRKTTLQVDTLNAELAAERSAAQKSDNARQQLERQNKELKAKLQELEGAVKSKFKATISALEAKIGQLEEQLEQEAKERAAANKLVRRTEKKLKEIFMQVEDERRHADQYKEQMEKANARMKQLKRQLEEAEEEATRANASRRKLQRELDDATEANEGLSREVSTLKNRLRRGGPISFSSSRSGRRQLHLEGASLELSDDDTESKTSDVNETQPPQSE

SEQ ID NO: 40902 - protein, 1525 aa, Artificial Sequence
  Synthetic polypeptide
RQLYSAAAKKKRRLEQLNSFEQLCINYTNEKLQQLFNHTMFILEQEEYQREGIEWNFIDFGLDLQPCIDLIERPANPPGVLALLDEECWFPKATDKTFVEKLVQEQGSHSKFQKPRQLKDKADFCIIHYAGKVDYKADEWLMKNMDPLNDNVATLLHQSSDRFVAELWKDVDRIVGLDQVTGMTETAFGSAYKTKKGMFRTVGQLYKESLTKLMATLRNTNPNFVRCIIPNHEKRAGKLDPHLVLDQLRCNGVLEGIRICRQGFPNRIVFQEFRQRYEILTPNAIPKGFMDGKQACERMIRALELDPNLYRIGQSKIFFRAGVLAHLEEERDLKITDIIIFFQAVCRGYLARKAFAKKQQQLSALKVLQRNCAAYLKLRHWQWWRVFTKVKPLLQVTRQEEELQAKDEELLKVKEKQTKVEGELEEMERKHQQLLEEKNILAEQLQAETELFAEAEEMRARLAAKKQELEEILHDLESRVEEEEERNQILQNEKKKMQAHIQDLEEQLDEEEGARQKLQLEKVTAEAKIKKMEEEILLLEDQNSKFIKEKKLMEDRIAECSSQLAEEEEKAKNLAKIRNKQEVMISDLEERLKKEEKTRQELEKAKRKLDGETTDLQDQIAELQAQIDELKLQLAKKEEELQGALARGDDETLHKNNALKVVRELQAQIAELQEDFESEKASRNKAEKQKRDLSEELEALKTELEDTLDTTAAQQELRTKREQEVAELKKALEEETKNHEAQIQDMRQRHATALEELSEQLEQAKRFKANLEKNKQGLETDNKELACEVKVLQQVKAESEHKRKKLDAQVQELHAKVSEGDRLRVELAEKASKLQNELDNVSTLLEEAEKKGIKFAKDAASLESQLQDTQELLQEETRQKLNLSSRIRQLEEEKNSLQEQQEEEEEARKNLEKQVLALQSQLADTKKKVDDDLGTIESLEEAKKKLLKDAEALSQRLEEKALAYDKLEKTKNRLQQELDDLTVDLDHQRQVASNLEKKQKKFDQLLAEEKSISARYAEERDRAEAEAREKETKALSLARALEEALEAKEEFERQNKQLRADMEDLMSSKDDVGKNVHELEKSKRALEQQVEEMRTQLEELEDELQATEDAKLRLEVNMQAMKAQFERDLQTRDEQNEEKKRLLIKQVRELEAELEDERKQRALAVASKKKMEIDLKDLEAQIEAANKARDEVIKQLRKLQAQMKDYQRELEEARASRDEIFAQSKESEKKLKSLEAEILQLQEELASSERARRHAEQERDELADEITNSASGKSALLDEKRRLEARIAQLEEELEEEQSNMELLNDRFRKTTLQVDTLNAELAAERSAAQKSDNARQQLERQNKELKAKLQELEGAVKSKFKATISALEAKIGQLEEQLEQEAKERAAANKLVRRTEKKLKEIFMQVEDERRHADQYKEQMEKANARMKQLKRQLEEAEEEATRANASRRKLQRELDDATEANEGLSREVSTLKNRLRRGGPISFSSSRSGRRQLHLEGASLELSDDDTESKTSDVNETQPPQSE

SEQ ID NO: 40903 - protein, 5 aa, Artificial Sequence
  Synthetic polypeptide
TTELL

SEQ ID NO: 40904 - protein, 56 aa, Artificial Sequence
  Synthetic polypeptide
ESRLQGHTASSSVPVLPHMKWTNLGNAVRSSVLNCYLSIRRRCVRSGKHRLHLMRS

SEQ ID NO: 40905 - protein, 381 aa, Artificial Sequence
  Synthetic polypeptide
RIQTPGPHCQLFSPSSTTYEMDKLRERCEELRVELLSIHQKKVCEERKAQIAFNEELSRQKLVEEQMFSKLWEEDRLAKEKREAQEARRQKELMENTRLGLNAQITSIKAQRQATQLLKEEEARLVESNNAQIKHENEQDMLKKQKAKQETRTILQKALQERIEHIQQEYRDEQDLNMKLVQRALQDLQEEADKKKQKREDMIREQKIYHKYLAQRREEEKAQEKEFDRILEEDKAKKLAEKDKELRLEKEARRQLVDEVMCTRKLQVQEKLQREAKEQEERAMEQKHINESLKELNCEEKENFARRQRLAQEYRKQLQMQIAYQQQSQEAEKEEKRREFEAGVAANKMCLDKVQEVLSTHQVLPQNIHPMRKACPSKLPP

SEQ ID NO: 40906 - protein, 189 aa, Artificial Sequence
  Synthetic polypeptide
KLSLFADDMIVYLENPIVSAQNLLKLISNFSKVSGYKINVQKSQAFLYTNNRQTESQIMNELPFTIASKRIKYLGIQLTRDVKDLFKENYKPLLKEIKEDTNKWKNIPCSWVGRINIVKMAILPKGFVLAVTMTREAIDEFRRFQRDKEVNSQLYSKLTVRGKVQVKSSDIQVGDLIIVEKNQRIPSDM

SEQ ID NO: 40907 - protein, 228 aa, Artificial Sequence
  Synthetic polypeptide
KLSLFADDMIVYLENPIVSAQNLLKLISNFSKVSGYKINVQKSQAFLYTNNRQTESQIMNELPFTIASKRIKYLGIQLTRDVKDLFKENYKPLLKEIKEDTNKWKNIPCSWVGRINIVKMAILPKGFVLAVTMTREAIDEFRRFQRDKEVNSQLYSKLTVRGKVQVKSSDIQVGDLIIVEKNQRIPSDMVFLRTSEKAGPFFYQCLCLCSETTNGHSQFRRHIYQGRQ

SEQ ID NO: 40908 - protein, 1075 aa, Artificial Sequence
  Synthetic polypeptide
KLSLFADDMIVYLENPIVSAQNLLKLISNFSKVSGYKINVQKSQAFLYTNNRQTESQIMNELPFTIASKRIKYLGIQLTRDVKDLFKENYKPLLKEIKEDTNKWKNIPCSWVGRINIVKMAILPKGFVLAVTMTREAIDEFRRFQRDKEVNSQLYSKLTVRGKVQVKSSDIQVGDLIIVEKNQRIPSDMVFLRTSEKAGSCFIRTDQLDGETDWKLKVAVSCTQQLPALGDLFSISAYVYAQKPQMDIHSFEGTFTREDSDPPIHESLSIENTLWASTIVASGTVIGVVIYTGKETRSVMNTSNPKNKVGLLDLELNRLTKALFLALVALSIVMVTLQGFVGPWYRNLFRFLLLFSYIIPISLRVNLDMGKAVYGWMMMKDENIPGTVVRTSTIPEELGRLVYLLTDKTGTLTQNEMIFKRLHLGTVSYGADTMDEIQSHVRDSYSQMQSQAGGNNTGSTPLRKAQSSAPKVRKSVSSRIHEAVKAIVLCHNVTPVYESRAGVTEETEFAEADQDFSDENRTYQASSPDEVALVQWTESVGLTLVSRDLTSMQLKTPSGQVLSFCILQLFPFTSESKRMGVIVRDESTAEITFYMKGADVAMSPIVQYNDWLEEECGNMAREGLRTLVVAKKALTEEQYQDFESRYTQAKLSMHDRSLKVAAVVESLEREMELLCLTGVEDQLQADVRPTLEMLRNAGIKIWMLTGDKLETATCIAKSSHLVSRTQDIHIFRQVTSRGEAHLELNAFRRKHDCALVISGDSLEVCLKYYEHEFVELACQCPAVVCCRCSPTQKARIVTLLQQHTGRRTCAIGDGGNDVSMIQAADCGIGIEGKEGKQASLAADFSITQFRHIGRLLMVHGRNSYKRSAALGQFVMHRGLIISTMQAVFSSVFYFASVPLYQGFLMVGYATIYTMFPVFSLVLDQDVKPEMAMLYPELYKDLTKGRSLSFKTFLIWVLISIYQGGILMYGALVLFESEFVHVVAISFTALILTELLMVALTVRTWHWLMVVAEFLSLGCYVSSLAFLNEYFDVAFITTVTFLWKVSAITVVSCLPLYVLKYLRRKLSPPSYCKLAS

SEQ ID NO: 40909 - protein, 1086 aa, Artificial Sequence
  Synthetic polypeptide
KLSLFADDMIVYLENPIVSAQNLLKLISNFSKVSGYKINVQKSQAFLYTNNRQTESQIMNELPFTIASKRIKYLGIQLTRDVKDLFKENYKPLLKEIKEDTNKWKNIPCSWVGRINIVKMAILPKGFVLAVTMTREAIDEFRRFQRDKEVNSQLYSKLTVRGKVQVKSSDIQVGDLIIVEKNQRIPSDMVFLRTSEKAGSCFIRTDQLDGETDWKLKVAVSCTQQLPALGDLFSISAYVYAQKPQMDIHSFEGTFTREDSDPPIHESLSIENTLWASTIVASGTVIGVVIYTGKETRSVMNTSNPKNKVGLLDLELNRLTKALFLALVALSIVMVTLQGFVGPWYRNLFRFLLLFSYIIPISLRVNLDMGKAVYGWMMMKDENIPGTVVRTSTIPEELGRLVYLLTDKTGTLTQNEMIFKRLHLGTVSYGADTMDEIQSHVRDSYSQMQSQAGGNNTGSTPLRKAQSSAPKVRKSVSSRIHEAVKAIVLCHNVTPVYESRAGVTEETEFAEADQDFSDENRTYQASSPDEVALVQWTESVGLTLVSRDLTSMQLKTPSGQVLSFCILQLFPFTSESKRMGVIVRDESTAEITFYMKGADVAMSPIVQYNDWLEEECGNMAREGLRTLVVAKKALTEEQYQDFESRYTQAKLSMHDRSLKVAAVVESLEREMELLCLTGVEDQLQADVRPTLEMLRNAGIKIWMLTGDKLETATCIAKSSHLVSRTQDIHIFRQVTSRGEAHLELNAFRRKHDCALVISGDSLEVCLKYYEHEFVELACQCPAVVCCRCSPTQKARIVTLLQQHTGRRTCAIGDGGNDVSMIQAADCGIGIEGKEGKQASLAADFSITQFRHIGRLLMVHGRNSYKRSAALGQFVMHRGLIISTMQAVFSSVFYFASVPLYQGFLMVGYATIYTMFPVFSLVLDQDVKPEMAMLYPELYKDLTKGRSLSFKTFLIWVLISIYQGGILMYGALVLFESEFVHVVAISFTALILTELLMVALTVRTWHWLMVVAEFLSLGCYVSSLAFLNEYFGIGRVSFGAFLDVAFITTVTFLWKVSAITVVSCLPLYVLKYLRRKLSPPSYCKLAS

SEQ ID NO: 40910 - protein, 14 aa, Artificial Sequence
  Synthetic polypeptide
KWPYCPRDLSWLLL

SEQ ID NO: 40911 - protein, 77 aa, Artificial Sequence
  Synthetic polypeptide
TPIHNCFKENKIPRNPTYKGCEGPLQGELQTTAQGNKRGHKQMEEHSMLMGRKNQYRENGHTAQGICLGCYYDTGSN

SEQ ID NO: 40912 - protein, 231 aa, Artificial Sequence; identical to SEQ ID NO: 40044
  Synthetic polypeptide

SEQ ID NO: 40913 - protein, 179 aa, Artificial Sequence
  Synthetic polypeptide
GWARWLTPVIPALWEAKASGSLEGPFVTWRSMSVLPAHAAREVPVWMGKMASAASARLAPCPHSASPRAIPVPMSPAVTASAMMHLAGSAVCVSLAGVAPAAARAWPETPVSPSRAGPVGHAAAMEWVSTAPARLVSRDVSVNSSPPAPRTPVSMGAAASLPLASCLSAPAPRAGKTHA

SEQ ID NO: 40914 - protein, 17 aa, Artificial Sequence
  Synthetic polypeptide
SQRSGRPRQVDHLRAPL

SEQ ID NO: 40915 - protein, 50 aa, Artificial Sequence
  Synthetic polypeptide
GMLHTVEHYSAMKRPTSTSGPGRSCSWLSAASVTLPRMLSPSASSTSLAP

SEQ ID NO: 40916 - protein, 20 aa, Artificial Sequence
  Synthetic polypeptide
KDLRLPVALDAPAPGCQRLL

SEQ ID NO: 40917 - protein, 127 aa, Artificial Sequence
  Synthetic polypeptide
WNVTHSGALLSNEKTYVYQWPWTLLLLAVSGFCNFAQNVIAFSILNLVSPLSYSVANATKRIMVITVSLIMLRNPVTSTNVLGMMTAILGVFLYNKTKYDANQQARKHLLPVTTADLSSKERHRSPL

SEQ ID NO: 40918 - protein, 172 aa, Artificial Sequence
  Synthetic polypeptide
WNVTHSGALLSNEKTYVYQWPWTLLLLAVSGFCNFAQNVIAFSILNLVSPLSYSVANATKRIMVITVSLIMLRNPVTSTNVLGMMTAILGVFLYNKTKYDANQQARKHLLPVTTADLSSKERHRSPLEKPHNGLLFPQHGDYQYGRNNILTDHFQYSRQSYPNSYSLNRYDV

SEQ ID NO: 40919 - protein, 7 aa, Artificial Sequence
  Synthetic polypeptide
HRREKSW

SEQ ID NO: 40920 - protein, 8 aa, Artificial Sequence
  Synthetic polypeptide
HRREKSWL

SEQ ID NO: 40921 - protein, 17 aa, Artificial Sequence
  Synthetic polypeptide
VQEFETNLGNIGEKNHG

SEQ ID NO: 40922 - protein, 25 aa, Artificial Sequence
  Synthetic polypeptide
VQEFETNLGNIGEKNHGFEVLYHSV

SEQ ID NO: 40923 - protein, 30 aa, Artificial Sequence
  Synthetic polypeptide
VQEFETNLGNIGEKNHGFEVLYHSVKQGPI

SEQ ID NO: 40924 - protein, 37 aa, Artificial Sequence
  Synthetic polypeptide
VQEFETNLGNIGEKNHGFEVLYHSVKQGPISTKELAD

SEQ ID NO: 40925 - protein, 44 aa, Artificial Sequence
  Synthetic polypeptide
VQEFETNLGNIGEKNHGFEVLYHSVKQGPISTKELADFIRERAT

SEQ ID NO: 40926 - protein, 94 aa, Artificial Sequence
  Synthetic polypeptide
VQEFETNLGNIGEKNHGFEVLYHSVKQGPISTKELADFIRERATIEETYSKAMAKLSKLASNGTPMGTFAPLWEVFRVSSDKLALCHLELTRKL

SEQ ID NO: 40927 - protein, 99 aa, Artificial Sequence
  Synthetic polypeptide
VQEFETNLGNIGEKNHGFEVLYHSVKQGPISTKELADFIRERATIEETYSKAMAKLSKLASNGTPMGTFAPLWEVFRVSSDKLALCHLELTRKLQDLIK

SEQ ID NO: 40928 - protein, 103 aa, Artificial Sequence
  Synthetic polypeptide
VQEFETNLGNIGEKNHGFEVLYHSVKQGPISTKELADFIRERATIEETYSKAMAKLSKLASNGTPMGTFAPLWEVFRVSSDKLALCHLELTRKLQDLIKDVLR

SEQ ID NO: 40929 - protein, 113 aa, Artificial Sequence
  Synthetic polypeptide
VQEFETNLGNIGEKNHGFEVLYHSVKQGPISTKELADFIRERATIEETYSKAMAKLSKLASNGTPMGTFAPLWEVFRVSSDKLALCHLELTRKLQDLIKDVLRYGEEQLKTHK

SEQ ID NO: 40930 - protein, 127 aa, Artificial Sequence
  Synthetic polypeptide
VQEFETNLGNIGEKNHGFEVLYHSVKQGPISTKELADFIRERATIEETYSKAMAKLSKLASNGTPMGTFAPLWEVFRVSSDKLALCHLELTRKLQDLIKDVLRYGEEQLKTHKKCKEEVVSTLDAVQ

SEQ ID NO: 40931 - protein, 157 aa, Artificial Sequence
  Synthetic polypeptide
VQEFETNLGNIGEKNHGFEVLYHSVKQGPISTKELADFIRERATIEETYSKAMAKLSKLASNGTPMGTFAPLWEVFRVSSDKLALCHLELTRKLQDLIKDVLRYGEEQLKTHKKCKEEVVSTLDAVQVLSGVSQLLPKSRENYLNRCMDQERLRRES

SEQ ID NO: 40932 - protein, 177 aa, Artificial Sequence
  Synthetic polypeptide
VQEFETNLGNIGEKNHGFEVLYHSVKQGPISTKELADFIRERATIEETYSKAMAKLSKLASNGTPMGTFAPLWEVFRVSSDKLALCHLELTRKLQDLIKDVLRYGEEQLKTHKKCKEEVVSTLDAVQVLSGVSQLLPKSRENYLNRCMDQERLRRESTSQKEMDKAETKTKKAAESL

SEQ ID NO: 40933 - protein, 220 aa, Artificial Sequence
  Synthetic polypeptide
VQEFETNLGNIGEKNHGFEVLYHSVKQGPISTKELADFIRERATIEETYSKAMAKLSKLASNGTPMGTFAPLWEVFRVSSDKLALCHLELTRKLQDLIKDVLRYGEEQLKTHKKCKEEVVSTLDAVQVLSGVSQLLPKSRENYLNRCMDQERLRRESTSQKEMDKAETKTKKAAESLRRSVEKYNSARADFEQKMLDSALRFQAMEETHLRHMKALLGSY

SEQ ID NO: 40934 - protein, 266 aa, Artificial Sequence
  Synthetic polypeptide
VQEFETNLGNIGEKNHGFEVLYHSVKQGPISTKELADFIRERATIEETYSKAMAKLSKLASNGTPMGTFAPLWEVFRVSSDKLALCHLELTRKLQDLIKDVLRYGEEQLKTHKKCKEEVVSTLDAVQVLSGVSQLLPKSRENYLNRCMDQERLRRESTSQKEMDKAETKTKKAAESLRRSVEKYNSARADFEQKMLDSALRFQAMEETHLRHMKALLGSYAHSVEDTHVQIGQVHEEFKQNIENVSVEMLLRKFAESKGTGREKPG

SEQ ID NO: 40935 - protein, 893 aa, Artificial Sequence
  Synthetic polypeptide
VQEFETNLGNIGEKNHGFEVLYHSVKQGPISTKELADFIRERATIEETYSKAMAKLSKLASNGTPMGTFAPLWEVFRVSSDKLALCHLELTRKLQDLIKDVLRYGEEQLKTHKKCKEEVVSTLDAVQVLSGVSQLLPKSRENYLNRCMDQERLRRESTSQKEMDKAETKTKKAAESLRRSVEKYNSARADFEQKMLDSALRFQAMEETHLRHMKALLGSYAHSVEDTHVQIGQVHEEFKQNIENVSVEMLLRKFAESKGTGREKPGPLDFEAYSAAALQEAMKRLRGAKAFRLPGLSRREREPEPPAAVDFLEPDSGTCPEVDEEGFTVRPDVTQNSTAEPSRFSSSDSDFDDEEPRKFYVHIKPAPARAPACSPEAAAAQLRATAGSLILPPGPGGTMKRHSSRDAAGKPQRPRSAPRTSSCAERLQSEEQVSKNLFGPPLESAFDHEDFTGSSSLGFTSSPSPFSSSSPENVEDSGLDSPSHAAPGPSPDSWVPRPGTPQSPPSCRAPPPEARGIRAPPLPDSPQPLASSPGPWGLEALAGGDLMPAPADPTAREGLAAPPRRLRSRKVSCPLTRSNGDLSRSLSPSPLGSSAASTALERPSFLSQTGHGVSRGPSPVVLGSQDALPIATAFTEYVHAYFRGHSPSCLARVTGELTMTFPAGIVRVFSGTPPPPVLSFRLVHTTAIEHFQPNADLLFSDPSQSDPETKDFWLNMAALTEALQRQAEQNPTASYYNVVLLRYQFSRPGPQSVPLQLSAHWQCGATLTQVSVEYGYRPGATAVPTPLTNVQILLPVGEPVTNVRLQPAATWNLEEKRLTWRLPDVSEAGGSGRLSASWEPLSGPSTPSPVAAQFTSEGTTLSGVDLELVGSGYRMSLVKRRFATAAPPQGCTW

SEQ ID NO: 40936 - protein, 891 aa, Artificial Sequence
  Synthetic polypeptide
VQEFETNLGNIGEKNHGFEVLYHSVKQGPISTKELADFIRERATIEETYSKAMAKLSKLASNGTPMGTFAPLWEVFRVSSDKLALCHLELTRKLQDLIKDVLRYGEEQLKTHKKCKEEVVSTLDAVQVLSGVSQLLPKSRENYLNRCMDQERLRRESTSQKEMDKAETKTKKAAESLRRSVEKYNSARADFEQKMLDSALRFQAMEETHLRHMKALLGSYAHSVEDTHVQIGQVHEEFKQNIENVSVEMLLRKFAESKGTGREKPGPLDFEAYSAAALQEAMKRLRGAKAFRLPGLSRREREPEPPAAVDFLEPDSGTCPEVDEEGFTVRPDVTQNSTAEPSRFSSSDSDFDDEEPRKFYVHIKPAPARAPACSPEAAAAQLRATAGSLILPPGPGGTMKRHSSRDAAGKPQRPRSAPRTSSCAERLQSEEQVSKNLFGPPLESAFDHEDFTGSSSLGFTSSPSPFSSSSPENVEDSGLDSPSHAAPGPSPDSWVPRPGTPQSPPSCRAPPPEARGIRAPPLPDSPQPLASSPGPWGLEALAGGDLMPAPADPTAREGLAAPPRRLRSRKVSCPLTRSNGDLSRSLSPSPLGSSAASTALERPSFLSQTGHGVSRGPSPVVLGSQDALPIATAFTEYVHAYFRGHSPSCLARVTGELTMTFPAGIVRVFSGTPPPPVLSFRLVHTTAIEHFQPNADLLFSDPSQSDPETKDFWLNMAALTEALQRQAEQNPTASYYNVVLLRYQFSRPGPQSVPLQLSAHWQCGATLTQVSVEYGYRPGATAVPTPLTNVQILLPVGEPVTNVRLQPAATWNLEEKRLTWRLPDVSEAGGSGRLSASWEPLSGPSTPSPVAAQFTSEGTTLSGVDLELVGSGYRMSLVKRRFATGMYLVSC

SEQ ID NO: 40937 - protein, 187 aa, Artificial Sequence
  Synthetic polypeptide
VQEFETNLGNIGEKNHGFEVLYHSVKQGPISTKELADFIRERATIEETYSKAMAKLSKLASNGTPMGTFAPLWEVFRVSSDKLALCHLELTRKLQDLIKDVLRYGEEQLKTHKKVLSGVSQLLPKSRENYLNRCMDQERLRRESTSQKEMDKAETKTKKAAESLRRSVEKYNSARADFEQKMLDSAL

SEQ ID NO: 40938 - protein, 237 aa, Artificial Sequence
  Synthetic polypeptide
VQEFETNLGNIGEKNHGFEVLYHSVKQGPISTKELADFIRERATIEETYSKAMAKLSKLASNGTPMGTFAPLWEVFRVSSDKLALCHLELTRKLQDLIKDVLRYGEEQLKTHKKVLSGVSQLLPKSRENYLNRCMDQERLRRESTSQKEMDKAETKTKKAAESLRRSVEKYNSARADFEQKMLDSALRFQAMEETHLRHMKALLGSYAHSVEDTHVQIGQVHEEFKQNIENVSVEML

SEQ ID NO: 40939 - protein, 171 aa, Artificial Sequence
  Synthetic polypeptide
KTVPTISASELSLADGRDRPLRRLDPGLMPLPDTAAGLEWSSLVNAAKAYEVQRAVSLFSLNDPALSPDIPPAHSPVHSHLSLERGPPTPRTTPTMSEEPPLDLTGKVYQLEVMLKQLHTDLQKEKQDKVVLQSEVASLRQNNQRLQEESQAASEQLRKFAEIFCREKKEL

SEQ ID NO: 40940 - protein, 15 aa, Artificial Sequence
  Synthetic polypeptide
MKDSTHHLSLGALAG

SEQ ID NO: 40941 - protein, 29 aa, Artificial Sequence
  Synthetic polypeptide
TERQYPPSQPRSSRWLMGGTAPCGAWTLG

SEQ ID NO: 40942 - protein, 34 aa, Artificial Sequence
  Synthetic polypeptide
CGVFTKLNINMVTSREPGTTRFPKDRCTGPEVRK

SEQ ID NO: 40943 - protein, 38 aa, Artificial Sequence
  Synthetic polypeptide
GQVYWPRGPKMKVSIKKVKEQLKTPKDLLQTALLELRS

SEQ ID NO: 40944 - protein, 49 aa, Artificial Sequence
  Synthetic polypeptide
PPGSQGPPGFLRTGVLAQRSENESLNQESKRAVEDAKGSSSDSTAGVKE

SEQ ID NO: 40945 - protein, 398 aa, Artificial Sequence
  Synthetic polypeptide
MGIVAHACNPTTLGGQVNSLGISEELKEKLRDVMVDRHKVALGKTLGEGEFGAVMEGQLNQDDSILKVAVKTMKIAICTRSELEDFLSEAVCMKEFDHPNVMRLIGVCFQGSERESFPAPVVILPFMKHGDLHSFLLYSRLGDQPVYLPTQMLVKFMADIASGMEYLSTKRFIHRDLAARNCMLNENMSVCVADFGLSKKIYNGDYYRQGRIAKMPVKWIAIESLADRVYTSKSDVWSFGVTMWEIATRGQTPYPGVENSEIYDYLRQGNRLKQPADCLDGLYALMSRCWELNPQDRPSFTELREDLENTLKALPPAQEPDEILYVNMDEGGGYPEPPGAAGGADPPTQPDPKDSCSCLTAAEVHPAGRYVLCPSTTPSPAQPADRGSPAAPGQEDGA

SEQ ID NO: 40946 - protein, 14 aa, Artificial Sequence
  Synthetic polypeptide
SHHFGRPSEQPGHQ

SEQ ID NO: 40947 - protein, 26 aa, Artificial Sequence
  Synthetic polypeptide
AVNTHHYIPAWATESGRSGAGRTLRR

SEQ ID NO: 40948 - protein, 399 aa, Artificial Sequence
  Synthetic polypeptide
AWEVKDAVSCEHTPLHSSLGNREWEERRRQNIEKMNEEMEKIAEYERNQREGVLEPNPVRNFLDDPRRRSGPLEESERDRREESRRHGRNWGGPDFERVRCGLEHERQGRRAGLGSAGDMTLSMTGRERSEYLRWKQEREKIDQERLQRHRKPTGQWRREWDAEKTDGMFKDGPVPAHEPSHRYDDQAWARPPKPPTFGEFLSQHKAEASSRRRRKSSRPQAKAAPRAYSDHDDRWETKEGAASPAPETPQPTSPETSPKETPMQPPEIPAPAHRPPEDEGEENEGEEDEEWEDISEDEEEEEIEVEEGDEEEPAQDHQAPEAAPTGIPCSEQAHGVPFSPEEPLLEPQAPGTPSSPFSPPSGHQPVSDWGEEVELNSPRTTHLAGALSPGEAWPFESV

SEQ ID NO: 40949 - protein, 21 aa, Artificial Sequence
  Synthetic polypeptide
THTTTFQPGQQRVGGAAQAEH

SEQ ID NO: 40950 - protein, 971 aa, Artificial Sequence
  Synthetic polypeptide
ATIAPLHSSLDDRHGLIVADEEEYLIEPLHGGPKGSRSPEESGPHVVYKRSSLRHPHLDTACGVRDEKPWKGRPWWLRTLKPPPARPLGNETERGQPGLKRSVSRERYVETLVVADKMMVAYHGRRDVEQYVLAIMNIVAKLFQDSSLGSTVNILVTRLILLTEDQPTLEITHHAGKSLDSFCKWQKSIVNHSGHGNAIPENGVANHDTAVLITRYDICIYKNKPCGTLGLAPVGGMCERERSCSVNEDIGLATAFTIAHEIGHTFGMNHDGVGNSCGARGQDPAKLMAAHITMKTNPFVWSSCSRDYITSFLDSGLGLCLNNRPPRQDFVYPTVAPGQAYDADEQCRFQHGVKSRQCKYGEVCSELWCLSKSNRCITNSIPAAEGTLCQTHTIDKGWCYKRVCVPFGSRPEGVDGAWGPWTPWGDCSRTCGGGVSSSSRHCDSPRPTIGGKYCLGERRRHRSCNTDDCPPGSQDFREVQCSEFDSIPFRGKFYKWKTYRGGGVKACSLTCLAEGFNFYTERAAAVVDGTPCRPDTVDICVSGECKHVGCDRVLGSDLREDKCRVCGGDGSACETIEGVFSPASPGAGYEDVVWIPKGSVHIFIQDLNLSLSHLALKGDQESLLLEGLPGTPQPHRLPLAGTTFQLRQGPDQVQSLEALGPINASLIVMVLARTELPALRYRFNAPIARDSLPPYSWHYAPWTKCSAQCAGGSQVQAVECRNQLDSSAVAPHYCSAHSKLPKRQRACNTEPCPPDWVVGNWSLCSRSCDAGVRSRSVVCQRRVSAAEEKALDDSACPQPRPPVLEACHGPTCPPEWAALDWSECTPSCGPGLRHRVVLCKSADHRATLPPAHCSPAAKPPATMRCNLRRCPPARWVAGEWGECSAQCGVGQRQRSVRCTSHTGQASHECTEALRPPTTQQCEAKCDSPTPGDGPEECKDVNKVAYCPLVLKFQFCSRAYFRQMCCKTCHGH

SEQ ID NO: 40951 - protein, 157 aa, Artificial Sequence
  Synthetic polypeptide
ATIAPLHSSLDDRHGLIVADEEEYLIEPLHGGPKGSRSPEESGPHVVYKRSSLRHPHLDTACGVRDEKPWKGRPWWLRTLKPPPARPLGNETERGQPGLKRSVSRERYVETLVVADKMMVAYHGRRDVEQYVLAIMNIVRLPNFSRTRVWEAPLTSS

SEQ ID NO: 40952 - protein, 19 aa, Artificial Sequence
  Synthetic polypeptide
GCSELRLHHCTPAWMTDTA

SEQ ID NO: 40953 - protein, 14 aa, Artificial Sequence
  Synthetic polypeptide
QTRPDRGRRGRVPD

SEQ ID NO: 40954 - protein, 24 aa, Artificial Sequence
  Synthetic polypeptide
DQPGQHGCCSQNTKRWVSYLYCFY

SEQ ID NO: 40955 - protein, 14 aa, Artificial Sequence
  Synthetic polypeptide
GVRSLRPAWATWML

SEQ ID NO: 40956 - protein, 101 aa, Artificial Sequence
  Synthetic polypeptide
SQHFGRPKQEDHMRGQEFETSLGNMDVVARTQKDGFHIFIVSIKTENTDASWNLNVSLSMIGPHGYISASDWPLMIFYMVMCIVYILYGILWLTWSACYWK

SEQ ID NO: 40957 - protein, 413 aa, Artificial Sequence
  Synthetic polypeptide
SQHFGRPKQEDHMRGQEFETSLGNMDVVARTQKDGFHIFIVSIKTENTDASWNLNVSLSMIGPHGYISASDWPLMIFYMVMCIVYILYGILWLTWSACYWKDILRIQFWIAAVIFLGMLEKAVFYSEYQNISNTGLSTQGLLIFAELISAIKRTLARLLVIIVSLGYGIVKPRLGTVMHRVIGLGLLYLIFAAVEGVMRVIGGSNHLAVVLDDIILAVIDSIFVWFIFISLAQTMKTLRLRKNTVKFSLYRHFKNTLIFAVLASIVFMGWTTKTFRIAKCQSDWMERWVDDAFWSFLFSLILIVIMFLWRPSANNQRYAFMPLIDDSDDEIEEFMVTSENLTEGIKLRASKSVSNGTAKPATSENFDEDLKWVEENIPSSFTDVALPVLVDSDEEIMTRSEMAEKMFSSEKIM

SEQ ID NO: 40958 - protein, 48 aa, Artificial Sequence
  Synthetic polypeptide
APGLEKPVFKSWNCHILAGRAAEKASGVPCSQGKTEEPKHQALSKIQE

SEQ ID NO: 40959 - protein, 177 aa, Artificial Sequence
  Synthetic polypeptide
LEERQRKLQEYLAAKGKLKSQNTKPYLKSKNNCQNQPPSKSTIRPKNDVTNHVVLPVKPKRSISIKLQPRPPNTAGSQKPKLEPPKLLGKRLTSECVSSNPYSKPSSKSFQQCEAGSSTTGELSRKPVGSLNIEQLKTTKQQLTDQGNAKSTDFGLQVEKGCSPEPFSEQDSSQNSS

SEQ ID NO: 40960 - protein, 734 aa, Artificial Sequence
  Synthetic polypeptide
LEERQRKLQEYLAAKGKLKSQNTKPYLKSKNNCQNQPPSKSTIRPKNDVTNHVVLPVKPKRSISIKLQPRPPNTAGSQKPKLEPPKLLGKRLTSECVSSNPYSKPSSKSFQQCEAGSSTTGELSRKPVGSLNIEQLKTTKQQLTDQGNGKCIDFMNNIHVENESLDNFLKETNKENLLDILTEPERKPDPKLYTRSKPKTDSYNQTKNSLVPKQALGKSSVNSAVLKDRVNKQFVGETQSRTFPVKSQQLSRGADLARPGVKPSRTVPSHFIRTLSKVQSSKKPVVKNIKDIKVNRSQYERPNETKIRSYPVTEQRVKHTKPRTYPSLLQGEYNNRHPNIKQDQKSSQVCIPQTSCVLQKSKAISQRPNLTVGRFNSAIPSTPSIRPNGTSGNKHNNNGFQQKAQTLDSKLKKAVPQNHFLNKTAPKTQADVTTVNGTQTNPNIKKKATAEDRRKQLEEWQKSKGKTYKRPPMELKTKRKVIKEMNISFWKSIEKEEEEKKAQLELSSKINNTLTECLNLIEGGVPSNEILNILSSIPEAEKFAKFWICKAKLLASKGTFDVIGLYEEAIKNGATPIQELRKVVLNILQDSNRTTEGITSDSLVAETSITSVEELAKKMESVKSCLSPKEREQVTATPRIAKAEQHNYPGIKLQIGPIPRINGMPEVQDMKFITPVRRSSRIERAVSRYPEMLQEHDLVVASLDELLEVEETKCFIFRRNEALPVTLGFQTPES

SEQ ID NO: 40961 - protein, 40 aa, Artificial Sequence
  Synthetic polypeptide
RTVAVSSRVRKACFQVLELPHISWKSGRESFRSTLQPREN

SEQ ID NO: 40962 - protein, 353 aa, Artificial Sequence
  Synthetic polypeptide
LTVYQLKEIQKERNARKNDLRWKGFNQEDLEEEKGETQVKEAEDSDSDDNIKRGKHMDFLSDFEMMLQRKKSMSGKRRRNRDGGTFISDADDVVSAMIVKMNEAAEEDRQLNNQKKPALKKLTLLPAVVMHLKKQDLKETFIDSGVMSAIKEWLSPLPDRSLPALKIREELLKILQELPSVSQETLKHSGIGRAVMYLYKHPKESRSNKDMAGKLINEWSRPIFGLTSNYKGMTREEREQRDLEQMPQRRRMNSTGGQTPRRDLEKVLTGEEKALRPGDPGFCARARVPMPSNKDYVVRPKWNVEMESSRFQATSKKGISRLDKQMRKFTDIRKKSRSAHAVKISIEGNKMPL

SEQ ID NO: 40963 - protein, 32 aa, Artificial Sequence
  Synthetic polypeptide
RKYRRKEMQERMISDGRVLTKKIWKKKKVKHR

SEQ ID NO: 40964 - protein, 6 aa, Artificial Sequence
  Synthetic polypeptide
SQMEGF

SEQ ID NO: 40965 - protein, 56 aa, Artificial Sequence
  Synthetic polypeptide
FEPLVHLKMCENVGARVLPSVFSTCAVEILTARQKKAEELKRLTDLASQMAEMQLA

SEQ ID NO: 40966 - protein, 78 aa, Artificial Sequence
  Synthetic polypeptide
FEPLVHLKMCENVGARVLPSVFSTCAVEILTARQKKAEELKRLTDLASQMAEMQLAELRAEIKHFVSERKYDEELGKA

SEQ ID NO: 40967 - protein, 302 aa, Artificial Sequence
  Synthetic polypeptide
FEPLVHLKMCENVGARVLPSVFSTCAVEILTARQKKAEELKRLTDLASQMAEMQLAELRAEIKHFVSERKYDEELGKAARFSCDIEQLKAQIMLCGEITHPKNNYSSRTPCSSLLPLLNAHAATSGKQSNFSRKSSTHNKPSEGKAANPKMVSSLPSTADPSHQTMPANKQNGSSNQRRRFNPQYHNNRLNGPAKSQGSGNEAEPLGKGNSRHEHRRQPHNGFRPKNKGGAKNQEASLGMKTPEAPAHSEKPRRRQHAADTSEARPFRGSVGRVSQCNLCPTRIEVSTDAAVLSVPAVTLVA

SEQ ID NO: 40968 - protein, 33 aa, Artificial Sequence
  Synthetic polypeptide
KCWSQSTPQCLLYVCSGNPDCSSEESRRTKETH

SEQ ID NO: 40969 - protein, 22 aa, Artificial Sequence
  Synthetic polypeptide
RCVKMLEPEYSPVSSLRVQWKS

SEQ ID NO: 40970 - protein, 28 aa, Artificial Sequence
  Synthetic polypeptide
AICKPIDGNFADCGSDSSKLHASCQHSV

SEQ ID NO: 40971 - protein, 219 aa, Artificial Sequence
  Synthetic polypeptide
SQHVGRLKQEDHLRPRVQDQPRQYVNLLMAILLTVEVTHPNSMPAVNIQYEVIGNYYSSERMADNACVLFAVSVLMFIISSMLVYGAISYQVGWLIPFFCYRLFDFVLSCLVAISSLTYLPRIKEYLDQLPDFPYKDDLLALDSSCLLFIVLVFFALFIIFKAYLINCVWNCYKYINNRNVPEIAVYPAFEAPPQYVLPTYEMAVKMPEKEPPPPYLPA

SEQ ID NO: 40972 - protein, 32 aa, Artificial Sequence
  Synthetic polypeptide
HIKLICVGSEIDQHKLLHVDPKEKSTGCHWYP

SEQ ID NO: 40973 - protein, 448 aa, Artificial Sequence
  Synthetic polypeptide
ISISYCMLIQRKRALVAIGTHDLDTLSGPFTYTAKRPSDIKFKPLNKTKEYTACELMNIYKTDNHLKHYLHIIENKPLYPVIYDSNGVVLSMPPIINGDHSRITVNTRNIFIECTGTDFTKAKIVLDIIVTMFSEYCENQFTVEAAEVVFPNGKSHTFPELAYRKEMVRADLINKKVGIRETPENLAKLLTRMYLKSEVIGDGNQIEIEIPPTRADIIHACDIVEDAAIAYGYNNIQMTLPKTYTIANQFPLNKLTELLRHDMAAAGFTEALTFALCSQEDIADKLGVDISATKAVHISNPKTAEFQVARTTLLPGLLKTIAANRKMPLPLKLFEISDIVIKDSNTDVGAKNYRHLCAVYYNKNPGFEIIHGLLDRIMQLLDVPPGEDKGGYVIKASEGPAFFPGRCAEIFARGQSVGKLGVLHPDVITKFELTMPCSSLEINVGPFL

SEQ ID NO: 40974 - protein, 36 aa, Artificial Sequence
  Synthetic polypeptide
SKGKEHWLPLVPMIWTLCRAHLLILQSVLQISNSSL

SEQ ID NO: 40975 - protein, 16 aa, Artificial Sequence
  Synthetic polypeptide
EQNNYQEAISKEKKKK

SEQ ID NO: 40976 - protein, 143 aa, Artificial Sequence
  Synthetic polypeptide
GFREWLEFVGPSIRENGNTQRKNFKCLHRIHWSLWLNTKLCMLRVKFQETGQRTITRNRTTTRKLYPKRRRKSETICERCCQEGPEGCLHSSGQGDDQVKEGCEQAVCIQSTHELSAHGDEEPARGLASGWFPAEEHRSDEGH

SEQ ID NO: 40977 - protein, 177 aa, Artificial Sequence
  Synthetic polypeptide
GFREWLEFVGPSIRENGNTQRKNFKCLHRIHWSLWLNTKLCMLRVKFQETGQRTITRNRTTTRKLYPKRRRKSETICERCCQEGPEGCLHSSGQGDDQVKEGCEQAVCIQSTHELSAHGDEEPARGLASGWFPAEEHRSDEGHAKSCEDSRDSGHHEGVVQRNDEGWDHRGDVRGHF

SEQ ID NO: 40978 - protein, 137 aa, Artificial Sequence
  Synthetic polypeptide
GFREWLEFVGPSIRENGNTQRKNFKCLHRIHWSLWLNTKLCMLRVKFQETGQRTITRNRTTTRKLYPKRRRKSETICERCCQEGPEGCLHSSGQGDDQVKEGHAKSCEDSRDSGHHEGVVQRNDEGWDHRGDVRGHF

SEQ ID NO: 40979 - protein, 166 aa, Artificial Sequence
  Synthetic polypeptide
NFKRLGKEQLLGTEQLPGSYIQREEEKVKRSVKDAAKKGQKDVCIVLAKEMIRSRKAMQSLVKIPEIQATMRELSKEMMKAGIIEEMLEDTFESMDDQEEMEEEAEMEIDRILFEITAGALGKAPSKVTDALPEPEPPGAMAASEDEEEEEEALEAMQSRLATLRS

SEQ ID NO: 40980 - protein, 98 aa, Artificial Sequence
  Synthetic polypeptide
NFKRLGKEQLLGTEQLPGSYIQREEEKVKRSVKDAAKKGQKDVCIVLAKEMIRSRKAVSKLYASKAHMNSVLMGMKNQLAVLRVAGSLQKSTEVMKAM

SEQ ID NO: 40981 - protein, 206 aa, Artificial Sequence
  Synthetic polypeptide
NFKRLGKEQLLGTEQLPGSYIQREEEKVKRSVKDAAKKGQKDVCIVLAKEMIRSRKAVSKLYASKAHMNSVLMGMKNQLAVLRVAGSLQKSTEVMKAMQSLVKIPEIQATMRELSKEMMKAGIIEEMLEDTFESMDDQEEMEEEAEMEIDRILFEITAGALGKAPSKVTDALPEPEPPGAMAASEDEEEEEEALEAMQSRLATLRS

SEQ ID NO: 40982 - protein, 1091 aa, Artificial Sequence
  Synthetic polypeptide
LLAIYLTSPCFSFLICKGAALHSSSESEMEEEGEEEEEEPRLPPSDLGGVPWKEAVRIHALLKGKSEEELEASKSFGPGNEEEEEEEEEYEEEEEEDYDEEEEESSEAGNQRLQQVMHAADPLEIQADVHWTHIREREEEERMAPASESSASGAPLDENDLEEDVDSEPAEIEGEAAEDGDPGDTGAELDDDQHWSDSPSDADRELRLPCPAEGEAELELRVSEDEEKLPASPKHQERGPSQATSPIRSPQESALLFIPVHSPSTEGPQLPPVPAATQEKSPEERLFPEPLLPKEKPKADAPSDLKAVHSPIRSQPVTLPEARTPVSPGSPQPQPPVAASTPPPSPLPICSQPQPSTEATVPSPTQSPIRFQPAPAKTSTPLAPLPVQSQSDTKDRLGSPLAVDEALRRSDLVEEFWMKSAEIRRSLGLTPVDRSKGPEPSFPTPAFRPVSLKSYSVEKSPQDEGLHLLKPLSIPKRLGLPKPEGEPLSLPTPRSPSDRELRSAQEERRELSSSSGLGLHGSSSNMKTLGSQSFNTSDSAMLTPPSSPPPPPPPGEEPATLRRKLREAEPNASVVPPPLPATWMRPPREPAQPPREEVRKSFVESVEEIPFADDVEDTYDDKTEDSSLQEKFFTPPSCWPRPEKPRHPPLAKENGRLPALEGTLQPQKRGLPLVSAEAKELAEERMRAREKSVKSQALRDAMARQLSRMQQMELASGAPRPRKASSAPSQGKERRPDSPTRPTLRGSEEPTLKHEATSEEVLSPPSDSGGPDGSFTSSEGSSGKSKKRSSLFSPRRNKKEKKSKGEGRPPEKPSSNLLEEAAAKPKSLWKSVFSGYKKDKKKKADDKSCPSTPSSGATVDSGKHRVLPVVRAELQLRRQLSFSEDSDLSSDDVLEKSSQKSRREPRTYTEEELNAKLTRRVQKAARRQAKQEELKRLHRAQIIQRQLQQVEERQRRLEERGVAVEKALRGEAGMGKKDDPKLMQEWFKLVQEKNAMVRYESELMIFARELELEDRQSRLQQELRERMAVEDHLKTEEELSEEKQILNEMLEVVEQRDSLVALLEEQRLREREEDKDLEAAMLSKGFSLNWS

SEQ ID NO: 40983 - protein, 55 aa, Artificial Sequence
  Synthetic polypeptide
PLPASVSSSAKVLHFIVVPSLRWRRRERRRRRSLACPHLTWVVFRGRRPCGSMPF

SEQ ID NO: 40984 - protein, 13 aa, Artificial Sequence
  Synthetic polypeptide
HGSEEHGPLGMGT

SEQ ID NO: 40985 - protein, 13 aa, Artificial Sequence
  Synthetic polypeptide
MAVKNMDLWVWAL

SEQ ID NO: 40986 - protein, 9 aa, Artificial Sequence
  Synthetic polypeptide
RTWTFGYGH

SEQ ID NO: 40987 - protein, 260 aa, Artificial Sequence
  Synthetic polypeptide
RQHFGRPRREDHLNPGVQEQPGQHRKAMETSASSSQPQDNSQVHRETEDVDYGETDFHKQDGKAGLFSQEQYERNKSSSSSSSSSSSSSSSSSSSSSESNDEDQQPRATGKHRRSLGAGYPHGNGSPGPGHGEPDVLKDELQLYGDAPGEVVPSGESGLRRRGSDPASGEVEASQLRRLNIKKDDEFFHFVLLCFAIGALLVCYHYYADWFMSLGVGLLTFASLETVGIYFGLVYRIHSVLQGFIPLFQKFRLTGFRKTD

SEQ ID NO: 40988 - protein, 36 aa, Artificial Sequence
  Synthetic polypeptide
TQEFKSSLGNIEKPWRLQHPPPSLRTTVKSTEKQKM

SEQ ID NO: 40989 - protein, 196 aa, Artificial Sequence
  Synthetic polypeptide
AEFRCSSCQRSWASAQVQILCHTYWEHWTSQGQVRMRLFGQRCQKCSWSQYEMPEFSSDSTMRILSNLVQHILKKYYGNGTRKSPEMPVILEVSLEGSHDTANCEACTLGICGQGLKSCMTKPSKSLLPHLKTGNSSPGIGAVYLANQAKNQSAEAKEAKGSGYEKLGPSRDPDPLNICVFILLLVFIVVKCFTSE

SEQ ID NO: 40990 - protein, 48 aa, Artificial Sequence
  Synthetic polypeptide
CLLLLKAFSGSPRQSSGVPPASEVGLPPKCRFCATRTGSTGHPRVRCV

SEQ ID NO: 40991 - protein, 58 aa, Artificial Sequence
  Synthetic polypeptide
KHSLVLLGRVPVFLLPAKLGFRPSADSVPHVLGALDIPGSGAYEALWPKVPEVLLVPI

SEQ ID NO: 40992 - protein, 14 aa, Artificial Sequence
  Synthetic polypeptide
EPEIRWICLKRVFC

SEQ ID NO: 40993 - protein, 19 aa, Artificial Sequence
  Synthetic polypeptide
TTIHATKYLHKNQKSGGFV

SEQ ID NO: 40994 - protein, 156 aa, Artificial Sequence
  Synthetic polypeptide
YPSTIVLLQEHQIEQLSMQQNTFIRTRNQVDLFKKSLLLIPIHLEVHWSLITVTLSNRIISFYDSQGIHFKFCVENIRKYLLTEAREKNRPEFLQGWQTAVTKCIPQQKNDSDCGVFVLQYCKCLALEQPFQFSQEDMPRVRKRIYKELCECRLMD

SEQ ID NO: 40995 - protein, 47 aa, Artificial Sequence
  Synthetic polypeptide
ARRGGSCLSSRHFGRLRQADHLRSLCEMQQRGVWGWPGLSGHGEPLP

SEQ ID NO: 40996 - protein, 26 aa, Artificial Sequence
  Synthetic polypeptide
GQARWLMPVIPALWEAEAGGSPEEPV

SEQ ID NO: 40997 - protein, 38 aa, Artificial Sequence
  Synthetic polypeptide
AHTCNPSTLGGRGPGAGTAVSATGLGSALPTTHRSPAY

SEQ ID NO: 40998 - protein, 685 aa, Artificial Sequence
  Synthetic polypeptide
LTPVIPALWEAEVQVQVQQSPQQVSAQLSPQLTVHQPTEQPIQVQVQIQGQAPQSAAPSIQTPSLQSPSPSQLQAAQIQVQHVQAAQQIQAAEIPEEHIPHQQIQAQLVAGQSLAGGQQIQIQTVGALSPPPSQQGSPREGERRVGTASVLQPVKKRKVDMPITVSYAISGQPVATVLAIPQGQQQSYVSLRPDLLTVDSAHLYSATGTITSPTGETWTIPVYSAQPRGDPQQQSITHIAIPQEAYNAVHVSGSPTALAAVKLEDDKEKMVGTTSVVKNSHEEVVQTLANSLFPAQFMNGNIHIPVAVQAVAGTYQNTAQTVHIWDPQQQPQQQTPQEQTPPPQQQQQQLQVTCSAQTVQVAEVEPQSQPQPSPELLLPNSLKPEEGLEVWKNWAQTKNAELEKDAQNRLAPIGRRQLLRFQEDLISSAVAELNYGLCLMTREARNGEGEPYDPDVLYYIFLCIQKYLFENGRVDDIFSDLYYVRFTEWLHEVLKDVQPRVTPLGYVLPSHVTEEMLWECKQLGAHSPSTLLTTLMFFNTKYFLLKTVDQHMKLAFSKVLRQTKKNPSNPKDKSTSIRYLKALGIHQTGQKVTDDMYAEQTENPENPLRCPIKLYDFYLFKCPQSVKGRNDTFYLTPEPVVAPNSPIWYSVQPISREQMGQMLTRILVIREIQEAIAVANASTMH

SEQ ID NO: 40999 - protein, 149 aa, Artificial Sequence
  Synthetic polypeptide
SQHFGRPRSRCRYSSLRNRSRLSSPHNSPFTSLLSNPSRSRCRSKARHHSQQPPPFRPRLCRVPVPRSCKQLRSRCSTCKQPSRSRLQKSRRSTSHISKSRLSWWLASLLLVVSRSKSRPWVPFPHHHPSRAHPGKGSGGLARPVSSNQ

SEQ ID NO: 41000 - protein, 78 aa, Artificial Sequence
  Synthetic polypeptide
AKITLLALQPRLTAGTGPLMGTPSPLMKKRSLMCLSPITTYPSTVPPWDTRQITPSLQTASTICLSTPVLGPSNASAP

SEQ ID NO: 41001 - protein, 93 aa, Artificial Sequence
  Synthetic polypeptide
AKITLLALQPRLTAGTGPLMGTPSPLMKKRSLMCLSPITTYPSTVPPWDTRQITPSLQTASTILARRITWERVKEADLGLHSQRSHIWIKRPG

SEQ ID NO: 41002 - protein, 33 aa, Artificial Sequence
  Synthetic polypeptide
FQLLRRLRHKSRLNLGGRGCGEPRSRYLRSSLG

SEQ ID NO: 41003 - protein, 33 aa, Artificial Sequence
  Synthetic polypeptide
GLKKRSVRPEYTGKHQRRNLENQRRTIQNTIWK

SEQ ID NO: 41004 - protein, 281 aa, Artificial Sequence
  Synthetic polypeptide
KNVLSDRSTLGSIKEGILKIKEEPSKILSGNKFQDRYFVLRDGFLFLYKDVKSSKHDKMFSLSSMKFYRGVKKKMKPPTSWGLTAYSEKHHWHLCCDSSRTQTEWMTSIFIAQHEYDIWPPAGKERKRSITKNPKIGGLPLIPIQHEGNATLARKNIESARAELERLRLSEKCDKESVDSSLKERASMVAHCLEHKDDKLRNRPRKHRSFNCLEDTEPEAPLGQPKGHKGLKTLRKTEDRNSKATLDSDHKLPSRVIEELNVVLQRSRTLPKELQDEQILK

SEQ ID NO: 41005 - protein, 31 aa, Artificial Sequence
  Synthetic polypeptide
TLGTPNGRRRIRAEKTFCQTGVHWEASKKES

SEQ ID NO: 41006 - protein, 60 aa, Artificial Sequence
  Synthetic polypeptide
ANSLVCCHVRHPFALPSSSTMIVKPPQTCGTSTLTIFRFCGPLVKGVLERIANAVCSLRI

SEQ ID NO: 41007 - protein, 64 aa, Artificial Sequence
  Synthetic polypeptide
ANSLVCCHVRHPFALPSSSTMIVKPPQTCGTSTLTIFRFCGPLVKGVLERYASCRSETLRKCMQ

SEQ ID NO: 41008 - protein, 10 aa, Artificial Sequence
  Synthetic polypeptide
SLPRHVELQL

SEQ ID NO: 41009 - protein, 74 aa, Artificial Sequence
  Synthetic polypeptide
WFYEGEFSLSKLSCLLPCKTSLCSSIIFHHDCEASPDMWNFNFDHFQILRAIGKGSFGKDCQCRLFLENLSEES

SEQ ID NO: 41010 - protein, 437 aa, Artificial Sequence
  Synthetic polypeptide
WFYEGEFSLSKLSCLLPCKTSLCSSIIFHHDCEASPDMWNFNFDHFQILRAIGKGSFGKVCIVQKRDTKKMYAMKYMNKQKCIERDEVRNVFRELQIMQGLEHPFLVNLWYSFQDEEDMFMVVDLLLGGDLRYHLQQNVHFTEGTVKLYICELALALEYLQRYHIIHRDIKPDNILLDEHGHVHITDFNIATVVKGAERASSMAGTKPYMAPEVFQVYMDRGPGYSYPVDWWSLGITAYELLRGWRPYEIHSVTPIDEILNMFKVERVHYSSTWCKGMVALLRKLLTKDPESRVSSLHDIQSVPYLADMNWDAVFKKALMPGFVPNKGRLNCDPTFELEEMILESKPLHKKKKRLAKNRSRDGTKDSCPLNGHLQHCLETVREEFIIFNREKLRRQQGQGSQLLDTDSRGGGQAQSKLQDGCNNNLLTHTCTRGCSS

SEQ ID NO: 41011 - protein, 21 aa, Artificial Sequence
  Synthetic polypeptide
KPRGLDSESFQITEHTEVRSQ

SEQ ID NO: 41012 - protein, 97 aa, Artificial Sequence
  Synthetic polypeptide
LNIQRSEANDLALRLARHYTGHQDVVVLDHAYHGHLSSLIDISPYKFRNLDGQKEWVHVAPLPDTYRGPYREDHPNPAMAYANEVKRVVSSAQEKGR

SEQ ID NO: 41013 - protein, 342 aa, Artificial Sequence
  Synthetic polypeptide
LNIQRSEANDLALRLARHYTGHQDVVVLDHAYHGHLSSLIDISPYKFRNLDGQKEWVHVAPLPDTYRGPYREDHPNPAMAYANEVKRVVSSAQEKGRKIAAFFAESLPSVGGQIIPPAGYFSQVAEHIRKAGGVFVADEIQVGFGRVGKHFWAFQLQGKDFVPDIVTMGKSIGNGHPVACVAATQPVARAFEATGVEYFNTFGGSPVSCAVGLAVLNVLEKEQLQDHATSVGSFLMQLLGQQKIKHPIVGDVRGVGLFIGVDLIKDEATRTPATEEAAYLVSRLKENYVLLSTDGPGRNILKFKPPMCFSLDNARQVVAKLDAILTDMEEKVRSCETLRLQP

SEQ ID NO: 41014 - protein, 75 aa, Artificial Sequence
  Synthetic polypeptide
LNIQRSEANDLALRLARHYTGHQDVVVLDHAYHGHLSSLIDISPYKFRNLDGQKEWVHVVCTAQLNNSDMLSSLG

SEQ ID NO: 41015 - protein, 11 aa, Artificial Sequence
  Synthetic polypeptide
TYRGQKPMTWP

SEQ ID NO: 41016 - protein, 3 aa, Artificial Sequence
  Synthetic polypeptide
LLS

SEQ ID NO: 41017 - protein, 10 aa, Artificial Sequence
  Synthetic polypeptide
SMVTFKLIWA

SEQ ID NO: 41018 - protein, 26 aa, Artificial Sequence
  Synthetic polypeptide
GSSNRRTRSDPRSRQADRQSGENSRN

SEQ ID NO: 41019 - protein, 342 aa, Artificial Sequence
  Synthetic polypeptide
KVAATEEPEVIPDPAKQTDRVVKIAGISAGILVFILLLLVVILIVKKRRSYYSYSYYLKLAKKRKDAMGNTRQEMTHMVNAMDRSYADQSTLHAEDPLSITFMDQHNFSPRLPNDPLVPTAVLDENHSATAESSRLLDVPRYLCEGTESPYQTGQLHPAIRVADLLQHINLMKTSDSYGFKEEYESFFEGQSASWDVAKKDQNRAKNRYGNIIAYDHSRVILQPVEDDPSSDYINANYIDGYQRPSHYIATQGPVHETVYDFWRMIWQEQSACIVMVTNLVEVGRVKCYKYWPDDTEVYGDFKVTCVEMEPLAEYVVRTFTLERRGYNEIREVKQFHFTGWP

SEQ ID NO: 41020 - protein, 742 aa, Artificial Sequence
  Synthetic polypeptide
KVAATEEPEVIPDPAKQTDRVVKIAGISAGILVFILLLLVVILIVKKRRSYYSYSYYLKLAKKRKDAMGNTRQEMTHMVNAMDRSYADQSTLHAEDPLSITFMDQHNFSPRLPNDPLVPTAVLVPITDENHSATAESSRLLDVPRYLCEGTESPYQTGQLHPAIRVADLLQHINLMKTSDSYGFKEEYESFFEGQSASWDVAKKDQNRAKNRYGNIIAYDHSRVILQPVEDDPSSDYINANYIDIWLYRDGYQRPSHYIATQGPVHETVYDFWRMIWQEQSACIVMVTNLVEVGRVKCYKYWPDDTEVYGDFKVTCVEMEPLAEYVVRTFTLERRGYNEIREVKQFHFTGWPDHGVPYHATGLLSFIRRVKLSNPPSAGPIVVHCSAGAGRTGCYIVIDIMLDMAEREGVVDIYNCVKALRSRRINMVQTEEQYIFIHDAILEACLCGETAIPVCEFKAAYFDMIRIDSQTNSSHLKDEFQTLNSVTPRLQAEDCSIACLPRNHDKNRFMDMLPPDRCLPFLITIDGESSNYINAALMDSYRQPAAFIVTQYPLPNTVKDFWRLVYDYGCTSIVMLNEVDLSQGCPQYWPEEGMLRYGPIQVECMSCSMDCDVINRIFRICNLTRPQEGYLMVQQFQYLGWASHREVPGSKRSFLKLILQVEKWQEECEEGEGRTIIHCLNGGGRSGMFCAIGIVVEMVKRQNVVDVFHAVKTLRNSKPNMVEAPEQYRFCYDVALEYLESS

SEQ ID NO: 41021 - protein, 728 aa, Artificial Sequence
  Synthetic polypeptide
KVAATEEPEVIPDPAKQTDRVVKIAGISAGILVFILLLLVVILIVKKSKLAKKRKDAMGNTRQEMTHMVNAMDRSYADQSTLHAEDPLSITFMDQHNFSPRLPNDPLVPTAVLDENHSATAESSRLLDVPRYLCEGTESPYQTGQLHPAIRVADLLQHINLMKTSDSYGFKEEYESFFEGQSASWDVAKKDQNRAKNRYGNIIAYDHSRVILQPVEDDPSSDYINANYIDIWLYRDGYQRPSHYIATQGPVHETVYDFWRMIWQEQSACIVMVTNLVEVGRVKCYKYWPDDTEVYGDFKVTCVEMEPLAEYVVRTFTLERRGYNEIREVKQFHFTGWPDHGVPYHATGLLSFIRRVKLSNPPSAGPIVVHCSAGAGRTGCYIVIDIMLDMAEREGVVDIYNCVKALRSRRINMVQTEEQYIFIHDAILEACLCGETAIPVCEFKAAYFDMIRIDSQTNSSHLKDEFQTLNSVTPRLQAEDCSIACLPRNHDKNRFMDMLPPDRCLPFLITIDGESSNYINAALMDSYRQPAAFIVTQYPLPNTVKDFWRLVYDYGCTSIVMLNEVDLSQGCPQYWPEEGMLRYGPIQVECMSCSMDCDVINRIFRICNLTRPQEGYLMVQQFQYLGWASHREVPGSKRSFLKLILQVEKWQEECEEGEGRTIIHCLNGGGRSGMFCAIGIVVEMVKRQNVVDVFHAVKTLRNSKPNMVEAPEQYRFCYDVALEYLESS

SEQ ID NO: 41022 - protein, 727 aa, Artificial Sequence
  Synthetic polypeptide
KVAATEEPEVIPDPAKQTDRVVKIAGISAGILVFILLLLVVILIVKKSKLAKKRKDAMGNTRQEMTHMVNAMDRSYADQSTLHAEDPLSITFMDQHNFSPRLPNDPLVPTAVLDENHSATAESSRLLDVPRYLCEGTESPYQTGQLHPAIRVADLLQHINLMKTSDSYGFKEEYESFFEGQSASWDVAKKDQNRAKNRYGNIIAYDHSRVILQPVEDDPSSDYINANYIDVSIFIGYQRPSHYIATQGPVHETVYDFWRMIWQEQSACIVMVTNLVEVGRVKCYKYWPDDTEVYGDFKVTCVEMEPLAEYVVRTFTLERRGYNEIREVKQFHFTGWPDHGVPYHATGLLSFIRRVKLSNPPSAGPIVVHCSAGAGRTGCYIVIDIMLDMAEREGVVDIYNCVKALRSRRINMVQTEEQYIFIHDAILEACLCGETAIPVCEFKAAYFDMIRIDSQTNSSHLKDEFQTLNSVTPRLQAEDCSIACLPRNHDKNRFMDMLPPDRCLPFLITIDGESSNYINAALMDSYRQPAAFIVTQYPLPNTVKDFWRLVYDYGCTSIVMLNEVDLSQGCPQYWPEEGMLRYGPIQVECMSCSMDCDVINRIFRICNLTRPQEGYLMVQQFQYLGWASHREVPGSKRSFLKLILQVEKWQEECEEGEGRTIIHCLNGGGRSGMFCAIGIVVEMVKRQNVVDVFHAVKTLRNSKPNMVEAPEQYRFCYDVALEYLESS

SEQ ID NO: 41023 - protein, 732 aa, Artificial Sequence
  Synthetic polypeptide
KVAATEEPEVIPDPAKQTDRVVKIAGISAGILVFILLLLVVILIVKKSKLAKKRKDAMGNTRQEMTHMVNAMDRSYADQSTLHAEDPLSITFMDQHNFSPRLPNDPLVPTAVLVPITDENHSATAESSRLLDVPRYLCEGTESPYQTGQLHPAIRVADLLQHINLMKTSDSYGFKEEYESFFEGQSASWDVAKKDQNRAKNRYGNIIAYDHSRVILQPVEDDPSSDYINANYIDIWLYRDGYQRPSHYIATQGPVHETVYDFWRMIWQEQSACIVMVTNLVEVGRVKCYKYWPDDTEVYGDFKVTCVEMEPLAEYVVRTFTLERRGYNEIREVKQFHFTGWPDHGVPYHATGLLSFIRRVKLSNPPSAGPIVVHCSAGAGRTGCYIVIDIMLDMAEREGVVDIYNCVKALRSRRINMVQTEEQYIFIHDAILEACLCGETAIPVCEFKAAYFDMIRIDSQTNSSHLKDEFQTLNSVTPRLQAEDCSIACLPRNHDKNRFMDMLPPDRCLPFLITIDGESSNYINAALMDSYRQPAAFIVTQYPLPNTVKDFWRLVYDYGCTSIVMLNEVDLSQGCPQYWPEEGMLRYGPIQVECMSCSMDCDVINRIFRICNLTRPQEGYLMVQQFQYLGWASHREVPGSKRSFLKLILQVEKWQEECEEGEGRTIIHCLNGGGRSGMFCAIGIVVEMVKRQNVVDVFHAVKTLRNSKPNMVEAPEQYRFCYDVALEYLESS

SEQ ID NO: 41024 - protein, 710 aa, Artificial Sequence
  Synthetic polypeptide
KVAATEEPEVIPDPAKQTDRVVKIAGISAGILVFILLLLVVILIVKKSKLAKKRKDAMGNTRQEMTHMVNAMDRSYADQSTLHAEDPLSITFMDQHNFSPRYENHSATAESSRLLDVPRYLCEGTESPYQTGQLHPAIRVADLLQHINLMKTSDSYGFKEEYESFFEGQSASWDVAKKDQNRAKNRYGNIIAYDHSRVILQPVEDDPSSDYINANYIDGYQRPSHYIATQGPVHETVYDFWRMIWQEQSACIVMVTNLVEVGRVKCYKYWPDDTEVYGDFKVTCVEMEPLAEYVVRTFTLERRGYNEIREVKQFHFTGWPDHGVPYHATGLLSFIRRVKLSNPPSAGPIVVHCSAGAGRTGCYIVIDIMLDMAEREGVVDIYNCVKALRSRRINMVQTEEQYIFIHDAILEACLCGETAIPVCEFKAAYFDMIRIDSQTNSSHLKDEFQTLNSVTPRLQAEDCSIACLPRNHDKNRFMDMLPPDRCLPFLITIDGESSNYINAALMDSYRQPAAFIVTQYPLPNTVKDFWRLVYDYGCTSIVMLNEVDLSQGCPQYWPEEGMLRYGPIQVECMSCSMDCDVINRIFRICNLTRPQEGYLMVQQFQYLGWASHREVPGSKRSFLKLILQVEKWQEECEEGEGRTIIHCLNGGGRSGMFCAIGIVVEMVKRQNVVDVFHAVKTLRNSKPNMVEAPEQYRFCYDVALEYLESS

SEQ ID NO: 41025 - protein, 716 aa, Artificial Sequence
  Synthetic polypeptide
KVAATEEPEVIPDPAKQTDRVVKIAGISAGILVFILLLLVVILIVKKSKLAKKRKDAMGNTRQEMTHMVNAMDRSYADQSTLHAEDPLSITFMDQHNFSPRYENHSATAESSRLLDVPRYLCEGTESPYQTGQLHPAIRVADLLQHINLMKTSDSYGFKEEYESFFEGQSASWDVAKKDQNRAKNRYGNIIAYDHSRVILQPVEDDPSSDYINANYIDIWLYRDGYQRPSHYIATQGPVHETVYDFWRMIWQEQSACIVMVTNLVEVGRVKCYKYWPDDTEVYGDFKVTCVEMEPLAEYVVRTFTLERRGYNEIREVKQFHFTGWPDHGVPYHATGLLSFIRRVKLSNPPSAGPIVVHCSAGAGRTGCYIVIDIMLDMAEREGVVDIYNCVKALRSRRINMVQTEEQYIFIHDAILEACLCGETAIPVCEFKAAYFDMIRIDSQTNSSHLKDEFQTLNSVTPRLQAEDCSIACLPRNHDKNRFMDMLPPDRCLPFLITIDGESSNYINAALMDSYRQPAAFIVTQYPLPNTVKDFWRLVYDYGCTSIVMLNEVDLSQGCPQYWPEEGMLRYGPIQVECMSCSMDCDVINRIFRICNLTRPQEGYLMVQQFQYLGWASHREVPGSKRSFLKLILQVEKWQEECEEGEGRTIIHCLNGGGRSGMFCAIGIVVEMVKRQNVVDVFHAVKTLRNSKPNMVEAPEQYRFCYDVALEYLESS

SEQ ID NO: 41026 - protein, 18 aa, Artificial Sequence
  Synthetic polypeptide
GAGQSCFNKPCGKFHLLG

SEQ ID NO: 41027 - protein, 335 aa, Artificial Sequence
  Synthetic polypeptide
GLGSLVSTSPAGNSTYLDDHGPPPSKVLPFPSQVVYNRVGKCGSRTVVLLLRILSEKHGFNLVTSDIHNKTRLTKNEQMELIKNISTAEQPYLFTRHVHFLNFSRFGGDQPVYINIIRDPVNRFLSNYFFRRFGDWRGEQNHMIRTPSMRQEERYLDINECILENYPECSNPRLFYIIPYFCGQHPRCREPGEWALERAKLNVNENFLLVGILEELEDVLLLLERFLPHYFKGVLSIYKDPEHRKLGNMTVTVKKTVPSPEAVQILYQRMRYEYEFYHYVKEQFHLLKRKFGLKSHVSKPPLRPHFFIPTPLETEEPIDDEEQDDEKWLEDIYKR

SEQ ID NO: 41028 - protein, 39 aa, Artificial Sequence
  Synthetic polypeptide
WGWAVLFQQALREIPLTWMTMDHLLVRYYLSQARWCTTG

SEQ ID NO: 41029 - protein, 36 aa, Artificial Sequence
  Synthetic polypeptide
LPCRSVEIEIKCRLIQEDLSEALSFSRKLPATKSRD

SEQ ID NO: 41030 - protein, 746 aa, Artificial Sequence
  Synthetic polypeptide
SFFFPDYHAGLLRLKSSVGSSRKTSQRPFPSLENYLLRNHETRKYLQEQAYRLQQGIVTSTTQQMIDRICVKVQDHLNSLRNCGGDAIQEDLKSAERLMRDAKNSKTLLPNLYHVGGASWAGASGLLSSPIQETLESMAGEVTRVVDEQLKALLESMVDAAENLCPNVMKKAHIRQDLIHASTEKISIPRTFVKNVLLEQSGIDILNKISEVKLTVASFLSDRIVDEILDALSHCHHKLADHFSRRGKTLPQQESLEIELAEEKPVKRSIITVEELTEIERLEDLDTCMMTPKSKRKSIHSRMLRPVSRAFEMEFDLDKALEEVPIHIEDPPFPSLRQEKRSSGFISELPSEEGKKLEHFTKLRPKRNKKQQPTQAAVCAANIVSQDGEQNGLMGRVDEGVDEFFTKKVTKMDSKKWSTRGSESHELNEGGDEKKKRDSRKSSGFLNLIKSRSKSERPPTILMTEEPSSPKGAVRSPPVDCPRKDTKAAEHNGNSERIEEIKTPDSFEESQGEEIGKVERSDSKSSPQAGRRYGVQVMGSGLLAEMKAKQEKRAACAQKKLGNDAVSQDSSSPALSGVERSDGGGAVPKLHPGLPENRFGLGTPEKNTKAEPKAEAGSRSRSSSSTPTSPKPLLQSPKPSLAARPVIPQKPRTASRPDDIPDSPSSPKVALLPPVLKKVPSDKERDGQSSPQPSPRTFSQEVSRRSWGQQAQEYQEQKQRSSSKDGHQGSKSNDSGEEAEKEFIFV

SEQ ID NO: 41031 - protein, 688 aa, Artificial Sequence
  Synthetic polypeptide
KNRYLEGSIAPEDKGSCSLLPGPPFARELHIEIVSSPHYSTNGNYDGVLYRHFQIPRVVQEGDVLCVPTIGQVEILEGSPEKLPRWREMFFKVKKTVGEAPDGPASAYLADTTHTSLYMVGSTLSPVPWLPSEESTLWSSLSPPGLEALVSELCAVLKPRLQPGGALLTGTSSVLLRGPPGCGKTTVVAAACSHLGLHLLKVPCSSLCAESSGAVETKLQAIFSRARRCRPAVLLLTAVDLLGRDRDGLGEDARVMAVLRHLLLNEDPLNSCPPLMVVATTSRAQDLPADVQTAFPHELEVPALSEGQRLSILRALTAHLPLGQEVNLAQLARRCAGFVVGDLYALLTHSSRAACTRIKNSGLAGGLTEEDEGELCAAGFPLLAEDFGQALEQLQTAHSQAVGAPKIPSVSWHDVGGLQEVKKEILETIQLPLEHPELLSLGLRRSGLLLHGPPGTGKTLLAKAVATECSLTFLSVKGPELINMYVGQSEENVREVFARARAAAPCIIFFDELDSLAPSRGRSGDSGGVMDRVVSQLLAELDGLHSTQDVFVIGATNRPDLLDPALLRPGRFDKLVFVGANEDRASQLRVLSAITRKFKLEPSVSLVNVLDCCPPQLTGADLYSLCSDAMTAALKRRVHDLEEGLEPGSSALMLTMEDLLQAAARLQPSVSEQELLRYKRIQRKFAAC

SEQ ID NO: 41032 - protein, 446 aa, Artificial Sequence
  Synthetic polypeptide
KNRYLEGSIAPEDKGSCSLLPGPPFARELHIEIVSSPHYSTNGNYDGVLYRHFQIPRVVQEGDVLCVPTIGQVEILEGSPEKLPRWREMFFKVKKTVGEAPDGPASAYLADTTHTSLYMVGSTLSPVPWLPSEESTLWSSLSPPGLEALVSELCAVLKPRLQPGGALLTGTSSVLLRGPPGCGKTTVVAAACSHLGLHLLKVPCSSLCAESSGAVETKLQAIFSRARRCRPAVLLLTAVDLLGRDRDGLGEDARVMAVLRHLLLNEDPLNSCPPLMVVATTSRAQDLPADVQTAFPHELEVPALSEGQRLSILRALTAHLPLGQEVNLAQLARRCAGFVVGDLYALLTHSSRAACTRIKNSGLAGGLTEEDEGELCAAGFPLLAEDFGQALEQLQTAHSQAVGAPKVETKSLECLPGPGLQLHALSSLMNWTLWPQAGGEVEILEE

SEQ ID NO: 41033 - protein, 67 aa, Artificial Sequence
  Synthetic polypeptide
PTWRNPVSTKKIGTWKAPSPLKTKEAAHCCLGLHLPESYTSKLCLLPTTALMEIMTVFFTGTFRYPG

SEQ ID NO: 41034 - protein, 101 aa, Artificial Sequence; identical to SEQ ID NO: 34438
  Synthetic polypeptide

SEQ ID NO: 41035 - protein, 76 aa, Artificial Sequence; identical to SEQ ID NO: 34437
  Synthetic polypeptide

SEQ ID NO: 41036 - protein, 535 aa, Artificial Sequence
  Synthetic polypeptide
SQHFGWPRRVDHEIRSSRPAWPTWGNLGSLQLEVRLRDETVLPSSYYQPLVHLLCHEVKLGMQGPGQLIPLIEETTSTECRQDVATNLLKLFLGQGLAKDFLDLLFQLELSRTSETNTLFRSNSLASKSVESFLKVAGMQYLHGVLGPIINKVFEEKKYVELDPSKVEVKDVGCSGLHRPQTEAEVLEQSAQTLRAHLGALLSALSRSVRACPAVVRATFRQLFRRVRERFPGAQHENVPFIAVTSFLCLRFFSPAIMSPKLFHLRERHADARTSRTLLLLAKAVQNVGNMDTPASRAKEAWMEPLQPTVHQGVAQLKDFITKLVDIEEKDELDLQRTLSLQAPPVKEGPLFIHRTKGKGPLMSSSFKKLYFSLTTEALSFAKTPSSKCVNELNQWLSALRKVSINNTGLLGSYHPGVFRGDKWSCCHQKEKTGQGCDKTRSRVTLQEWNDPLDHDLEAQLIYRHLLGVEAMLWERHRELSGGAEAGTVPTSPGKVPEDSLARLLRVLQDLREAHSSSPAGSPPSEPNCLLELQT

SEQ ID NO: 41037 - protein, 581 aa, Artificial Sequence
  Synthetic polypeptide
SQHFGWPRRVDHEIRSSRPAWPTWGNLGSLQLEVRLRDETVLPSSYYQPLVHLLCHEVKLGMQGPGQLIPLIEETTSTECRQDVATNLLKLFLGQGLAKDFLDLLFQLELSRTSETNTLFRSNSLASKSVESFLKVAGMQYLHGVLGPIINKVFEEKKYVELDPSKVEVKDVGCSGLHRPQTEAEVLEQSAQTLRAHLGALLSALSRSVRACPAVVRATFRQLFRRVRERFPGAQHENVPFIAVTSFLCLRFFSPAIMSPKLFHLRERHADARTSRTLLLLAKAVQNVGNMDTPASRAKEAWMEPLQPTVHQGVAQLKDFITKLVDIEEKDELDLQRTLSLQAPPVKEGPLFIHRTKGKGPLMSSSFKKLYFSLTTEALSFAKTPSSKKSALIKLANIRAAEKVEEKSFGGSHVMQVIYTDDAGRPQTAYLQCKCVNELNQWLSALRKVSINNTGLLGSYHPGVFRGDKWSCCHQKEKTGQGCDKTRSRVTLQEWNDPLDHDLEAQLIYRHLLGVEAMLWERHRELSGGAEAGTVPTSPGKVPEDSLARLLRVLQDLREAHSSSPAGSPPSEPNCLLELQT

SEQ ID NO: 41038 - protein, 151 aa, Artificial Sequence
  Synthetic polypeptide
AQEFETNLGNIAFLLIQSEKMKNDYIYLSWLARCYIMNKKPRLAWELYLKMETSGESFSLLQLIANDCYKMGQFYYSAKAFDVLERLDPNPEYWEGKRGACVGIFQMIIAGREPKETLREVLHLLRSTGNTQVEYMIRIMKKWAKENRVSI

SEQ ID NO: 41039 - protein, 84 aa, Artificial Sequence
  Synthetic polypeptide
AQEFETNLGNIAFLLIQSEKMKNDYIYLSWLARCYIMNKKPRLAWELYLKMETSGESFSLLQLIANDCYKRDPSRSAPFTEKHR

SEQ ID NO: 41040 - protein, 41 aa, Artificial Sequence
  Synthetic polypeptide
GWASWLTPIIPTFQKAEKWEDHLSSGVRDQPRQYSVPLDPK

SEQ ID NO: 41041 - protein, 42 aa, Artificial Sequence
  Synthetic polypeptide
GRARWLTPVIPALWEAEVGGSRGQEIETIPAKTVVSSPADVA

SEQ ID NO: 41042 - protein, 285 aa, Artificial Sequence
  Synthetic polypeptide
GRARWLTPVIPALWEAEVGGSRGQEIETIPAKTVVSSPADVAEKADRIITMLPTSINAIEAYSGANGILKKVKKGSLLIDSSTIDPAVSKELAKEVEKMGAVFMDAPVSGGVGAARSGNLTFMVGGVEDEFAAAQELLGCMGSNVVYCGAVGTGQAAKICNNMLLAISMIGTAEAMNLGIRLGLDPKLLAKILNMSSGRCWSSDTYNPVPGVMDGVPSANNYQGGFGTTLMAKDLGLAQDSATSTKSPILLGSLAHQIYRMMCAKGYSKKDFSSVFQFLREEETF

SEQ ID NO: 41043 - protein, 10 aa, Artificial Sequence
  Synthetic polypeptide
NGSIFPSRCC

SEQ ID NO: 41044 - protein, 24 aa, Artificial Sequence
  Synthetic polypeptide
SQHFGRPRWADHEVRRSRPSRLKR

SEQ ID NO: 41045 - protein, 14 aa, Artificial Sequence
  Synthetic polypeptide
QGQKTKHCMFSLIA

SEQ ID NO: 41046 - protein, 47 aa, Artificial Sequence
  Synthetic polypeptide
VHVLCRDMDEAGNNYSQQTLTRTENQTLHVLTHSLITMDSKNLRIFL

SEQ ID NO: 41047 - protein, 41 aa, Artificial Sequence
  Synthetic polypeptide
GRARWLTPVIPAHWEAEAGGSQDREIETILANMVWSPALWS

SEQ ID NO: 41048 - protein, 54 aa, Artificial Sequence
  Synthetic polypeptide
PGAVAHTCNPSTLGGRGGRITRSGDRDHPGQHGLEPGTVVITEQAVDTCFKAEF

SEQ ID NO: 41049 - protein, 197 aa, Artificial Sequence
  Synthetic polypeptide
PGAVAHTCNPSTLGGRGGRITRSGDRDHPGQHGLEPGTVVITEQAVDTCFKAEFEQIVLGKRVIRKTDLNKKLVQELLLCSAELSEFTTVVGNTMCTLDFYEGQGRLDGALCSYTEKDKQAYLEAAYAAGVRNIEMESSVFAAMCSACGLQAAVVCVTLLNRLEGDQISSPRNVLSEYQQRPQRLVSYFIKKKLSKA

SEQ ID NO: 41050 - protein, 45 aa, Artificial Sequence
  Synthetic polypeptide
SQHIGRPRRADHKIGRSRPSWPTWSGARHCGHNRAGSGYLLQGRV

SEQ ID NO: 41051 - protein, 21 aa, Artificial Sequence
  Synthetic polypeptide
QQSRIVATETVRKIYADDEHS

SEQ ID NO: 41052 - protein, 175 aa, Artificial Sequence
  Synthetic polypeptide
SRAELLPQRLCGKYMQMMNILKPIAFDVIHFMSQLFDYYLYAIYTFFGRNDSLESTGLGLSSSRLRTTLNRIQESLIDLEVSADPTATLTAAEERKEKVPSPHLSHLVVLTSGDTLYGLAERVVATESLVFLAEQFEFLQPHLDAVMPAVKKPFLQQFYSQSQPPVNYGNQFTGL

SEQ ID NO: 41053 - protein, 357 aa, Artificial Sequence
  Synthetic polypeptide
SRAELLPQRLCGKYMQMMNILKPIAFDVIHFMSQLFDYYLYAIYTFFGRNDSLESTGLGLSSSRLRTTLNRIQESLIDLEVSADPTATLTAAEERKEKVPSPHLSHLVVLTSGDTLYGLAERVVATESLVFLAEQFEFLQPHLDAVMPAVKKPFLQQFYSQTVSTASELRKPIYWIVAGKALDYEQMLLLMANVKWDVKEIMSQHNIYVDALLKEFEQFNRRLNEVSKRVRIPLPVSNILWEHCIRLANRTIVEGYANVKKCSNEGRALMQLDFQQFLMKLEKLTDIRPIPDKEFVETYIKAYYLTENDMERWIKEHREYSTKQLTNLVNVCLGSHINKKARQKLLAAIDDIDRPKR

SEQ ID NO: 41054 - protein, 17 aa, Artificial Sequence
  Synthetic polypeptide
TAEQNCCHRDCAENICR

SEQ ID NO: 41055 - protein, 578 aa, Artificial Sequence
  Synthetic polypeptide
DIATHARTVYEDSGPGRPLSCFMEEPAPYTDSTGAAAGGGNCRFVESPSQDQRLQAQRLRNPDVRGSLQTPQNRPHGHQSPELPEGYEQRTTVQGQVYFLHTQTGVSTWHDPRIPRDLNSVNCDELGPLPPGWEVRSTVSGRIYFVDHNNRTTQFTDPRLHHIMNHQCQLKEPSQPLPLPSEGSLEDEELPAQRYERDLVQKLKVLRHELSLQQPQAGHCRIEVSREEIFEESYRQIMKMRPKDLKKRLMVKFRGEEGLDYGGVAREWLYLLCHEMLNPYYGLFQYSTDNIYMLQINPDSSINPDHLSYFHFVGRIMGLAVFHGHYINGGFTVPFYKQLLGKPIQLSDLESVDPELHKSLVWILENDITPVLDHTFCVEHNAFGRILQHELKPNGRNVPVTEENKKEYVRLYVNWRFMRGIEAQFLALQKGFNELIPQHLLKPFDQKELELIIGGLDKIDLNDWKSNTRLKHCVADSNIVRWFWQAVETFDEERRARLLQFVTGSTRVPLQGFKALQGSTGAAGPRLFTIHLIDANTDNLPKAHTCFNRIDIPPYESYEKLYEKLLTAVEETCGFAVE

SEQ ID NO: 41056 - protein, 604 aa, Artificial Sequence
  Synthetic polypeptide
DIATHARTVYEDSGPGRPLSCFMEEPAPYTDSTGAAAGGGNCRFVESPSQDQRLQAQRLRNPDVRGSLQTPQNRPHGHQSPELPEGYEQRTTVQGQVYFLHTQTGVSTWHDPRIPSPSGTIPGGDAAFLYEFLLQGHTSEPRDLNSVNCDELGPLPPGWEVRSTVSGRIYFVDHNNRTTQFTDPRLHHIMNHQCQLKEPSQPLPLPSEGSLEDEELPAQRYERDLVQKLKVLRHELSLQQPQAGHCRIEVSREEIFEESYRQIMKMRPKDLKKRLMVKFRGEEGLDYGGVAREWLYLLCHEMLNPYYGLFQYSTDNIYMLQINPDSSINPDHLSYFHFVGRIMGLAVFHGHYINGGFTVPFYKQLLGKPIQLSDLESVDPELHKSLVWILENDITPVLDHTFCVEHNAFGRILQHELKPNGRNVPVTEENKKEYVRLYVNWRFMRGIEAQFLALQKGFNELIPQHLLKPFDQKELELIIGGLDKIDLNDWKSNTRLKHCVADSNIVRWFWQAVETFDEERRARLLQFVTGSTRVPLQGFKALQGSTGAAGPRLFTIHLIDANTDNLPKAHTCFNRIDIPPYESYEKLYEKLLTAVEETCGFAVE

SEQ ID NO: 41057 - protein, 118 aa, Artificial Sequence
  Synthetic polypeptide
LHMQERCMKTPGLGGRSAASWRNQPLTQIAPVLLLEEGIAGSWSPQVKIKDFRHSGFETLMCEVHYRRPRTDHTATSPRNCPKATNKEQQSRAKFTFCIHRLELARGTTPGYQETLTV

SEQ ID NO: 41058 - protein, 144 aa, Artificial Sequence
  Synthetic polypeptide
LHMQERCMKTPGLGGRSAASWRNQPLTQIAPVLLLEEGIAGSWSPQVKIKDFRHSGFETLMCEVHYRRPRTDHTATSPRNCPKATNKEQQSRAKFTFCIHRLELARGTTPGYQVPRGPFLGEMQLFYTNSFYKAIHLSPETLTV

SEQ ID NO: 41059 - protein, 32 aa, Artificial Sequence
  Synthetic polypeptide
TARKAKTGGKENLSTIHIQTNLRHSYTCKNGV

SEQ ID NO: 41060 - protein, 35 aa, Artificial Sequence
  Synthetic polypeptide
AQEFITSMGNMGQFEKEDRAHCGVSMEMWSLVTNL

SEQ ID NO: 41061 - protein, 883 aa, Artificial Sequence
  Synthetic polypeptide
GWVWWLMPVIPALWEATVGGSPEPRSSLPAWATWVSLKRRIELTVEYPWRCGALSPTSNCRTGMWSWKCLLFWAVLVTATLCTARPSPTLPEQAQPWGAPVEVESFLVHPGDLLQLRCRLRDDVQSINWLRDGVQLAESNRTRITGEEVEVQDSVPADSGLYACVTSSPSGSDTTYFSVNVSDALPSSEDDDDDDDSSSEEKETDNTKPNPVAPYWTSPEKMEKKLHAVPAAKTVKFKCPSSGTPNPTLRWLKNGKEFKPDHRIGGYKVRYATWSIIMDSVVPSDKGNYTCIVENEYGSINHTYQLDVVERSPHRPILQAGLPANKTVALGSNVEFMCKVYSDPQPHIQWLKHIEVNGSKIGPDNLPYVQILKTAGVNTTDKEMEVLHLRNVSFEDAGEYTCLAGNSIGLSHHSAWLTVLEALEERPAVMTSPLYLEIIIYCTGAFLISCMVGSVIVYKMKSGTKKSDFHSQMAVHKLAKSIPLRRQVTVSADSSASMNSGVLLVRPSRLSSSGTPMLAGVSEYELPEDPRWELPRDRLVLGKPLGEGCFGQVVLAEAIGLDKDKPNRVTKVAVKMLKSDATEKDLSDLISEMEMMKMIGKHKNIINLLGACTQDGPLYVIVEYASKGNLREYLQARRPPGLEYCYNPSHNPEEQLSSKDLVSCAYQVARGMEYLASKKCIHRDLAARNVLVTEDNVMKIADFGLARDIHHIDYYKKTTNGRLPVKWMAPEALFDRIYTHQSDVWSFGVLLWEIFTLGGSPYPGVPVEELFKLLKEGHRMDKPSNCTNELYMMMRDCWHAVPSQRPTFKQLVEDLDRIVALTSNQEYLDLSMPLDQYSPSFPDTRSSTCSSGEDSVFSHEPLPEEPCLPRHPAQLANGGLKRR

SEQ ID NO: 41062 - protein, 18 aa, Artificial Sequence
  Synthetic polypeptide
VDLLSPGVHYQHGQHGSV

SEQ ID NO: 41063 - protein, 45 aa, Artificial Sequence
  Synthetic polypeptide
EGGCLQARKGLSPGTESTGILILDFTSFRTNLTLSPRLLGCNGVA

SEQ ID NO: 41064 - protein, 24 aa, Artificial Sequence
  Synthetic polypeptide
SWTSHPSELISLCRPGCWDAMVWR

SEQ ID NO: 41065 - protein, 59 aa, Artificial Sequence
  Synthetic polypeptide
AQEFETSLGNMCTAAAIKAIRESGMNLNPEVEGTLIRVPIPQSAKWPMTQWQNWTGIWQ

SEQ ID NO: 41066 - protein, 120 aa, Artificial Sequence
  Synthetic polypeptide
AQEFETSLGNMCTAAAIKAIRESGMNLNPEVEGTLIRVPIPQVTREHREMLVKLAKQNTNKAKDSLRKVRTNSMNKLKKSKDTVSEDTIRLIEKQISQMADDTVAELDRHLAVKTKELLG

SEQ ID NO: 41067 - protein, 55 aa, Artificial Sequence
  Synthetic polypeptide
DQLGQHVYSCSYQGYKRKWNESEPRSGRDANSGTHSPISQMADDTVAELDRHLAV

SEQ ID NO: 41068 - protein, 84 aa, Artificial Sequence
  Synthetic polypeptide
DQLGQHVYSCSYQGYKRKWNESEPRSGRDANSGTHSPSNQRAQRNAGETGQTEHQQGQRLFTEGSHQLNEQAEEIQGYSLRGHH

SEQ ID NO: 41069 - protein, 42 aa, Artificial Sequence
  Synthetic polypeptide
QGVVAHAYKIPVLWEAEVGGSLEPRSLRPAWATCVQLQLSRL

SEQ ID NO: 41070 - protein, 72 aa, Artificial Sequence
  Synthetic polypeptide
DLKLPRRRSSSGTKASSRTAPVGSWMRQASRRSTSNSSRSETPPSLPHLFSTSLMKTRTGELSSPSSSRRCR

SEQ ID NO: 41071 - protein, 172 aa, Artificial Sequence
  Synthetic polypeptide
GLEVTEKEVQQWYKGFIKDCPSGQLDAAGFQKIYKQFFPFGDPTKFATFVFNVFDENKDGRIEFSEFIQALSVTSRGTLDEKLRWAFKLYDLDNDGYITRNEMLDIVDAIYQMVGNTVELPEEENTPEKRVDRIFAMMDKNADGKLTLQEFQEGSKADPSIVQALSLYDGLV

SEQ ID NO: 41072 - protein, 106 aa, Artificial Sequence
  Synthetic polypeptide
DSVFLSVLEDENTNLMGDGMAVKMKWESAGAYQSGWHRRFITPPLTGHPNLKSRTVSWCQRTSQSWRRLRNCWSIIGTSSGSFPPTPKSSKSSVLTSHVWTSSTRL

SEQ ID NO: 41073 - protein, 20 aa, Artificial Sequence
  Synthetic polypeptide
NGSLQVPIRVAGTEDLSHHL

SEQ ID NO: 41074 - protein, 314 aa, Artificial Sequence
  Synthetic polypeptide
WDGCEDEMGVCRCLSEWLAQKIYHTTFDWPPESEIQNRLMVPEDISELETAQKLLEYHRNIVRVIPSYPKILKVISADQPCVDVFYQALTYVQSNHRTNAPFTPRVLLLGPVGSGKSLQAALLAQKYRLVNVCCGQLLKEAVADRTTFGELIQPFFEKEMAVPDSLLMKVLSQRLDQQDCIQKGWVLHGVPRDLDQAHLLNRLGYNPNRVFFLNVPFDSIMERLTLRRIDPVTGERYHLMYKPPPTMEIQARLLQNPKDAEEQVKLKMDLFYRNSADLEQLYGSAITLNGDQDPYTVFEYIESGIINPLPKKIP

SEQ ID NO: 41075 - protein, 174 aa, Artificial Sequence
  Synthetic polypeptide
FWGLGFLHPGELLPHLPDGARLHGCPLAAPVPGAWHRLPGTAAFSHQHPELPHQRHGPAFLGHQLPHGPPLHVGAHHTHPGLQHWQPPAQLTYEPRQQQRGHQAPPGPQWRPQGPRPPLRKHGFLHQAHLRHLRGPLLRQALWSVQLRGVQGLLQADGAQGPDLHLPRQQGLPD

SEQ ID NO: 41076 - protein, 458 aa, Artificial Sequence
  Synthetic polypeptide
SSGALDFSTQVNSSLTSPTGRGSMAAPSLHPSLGPGIGSPGQLHSPISTLSSPINGMGPPFSVISSPMGPHSMSVPTTPTLGFSTGSPQLSSPMNPVSSSEDIKPPLGLNGVLKVPAHPSGNMASFTKHICAICGDRSSGKHYGVYSCEGCKGFFKRTVRKDLTYTCRDNKDCLIDKRQRNRCQYCRYQKCLAMGMKREAVQEERQRGKDRNENEVESTSSANEDMPVERILEAELAVEPKTETYVEANMGLNPSSPNDPVTNICQAADKQLFTLVEWAKRIPHFSELPLDDQVILLRAGWNELLIASFSHRSIAVKDGILLATGLHVHRNSAHSAGVGAIFDRVLTELVSKMRDMQMDKTELGCLRAIVLFNPDSKGLSNPAEVEALREKVYASLEAYCKHKYPEQPGRFAKLLLRLPALRSIGLKCLEHLFFFKLIGDTPIDTFLMEMLEAPHQMT

SEQ ID NO: 41077 - protein, 10 aa, Artificial Sequence
  Synthetic polypeptide
VLGPWISPPR

SEQ ID NO: 41078 - protein, 43 aa, Artificial Sequence
  Synthetic polypeptide
LDSEPEKENGKNGNIQISYKALADQVCTMLLLSSSLNSLRGAC

SEQ ID NO: 41079 - protein, 484 aa, Artificial Sequence
  Synthetic polypeptide
TRKRKWEKWQHSNKLQGFGRPSVYHAAIVIFLEFFAWGLLTTPMLTVLHETFSQHTFLMNGLIQGVKGLLSFLSAPLIGALSDVWGRKPFLLGTVFFTCFPIPLMRISPWWYFAMISVSGVFSVTFSVIFAYVADVTQEHERSTAYGWVSATFAASLVSSPAIGAYLSASYGDSLVVLVATVVALLDICFILVAVPESLPEKMRPVSWGAQISWKQADPFASLKKVGKDSTVLLICITVFLSYLPEAGQYSSFFLYLRQVIGFGSVKIAAFIAMVGILSIVAQTAFLSILMRSLGNKNTVLLGLGFQMLQLAWYGFGSQAWMMWAAGTVAAMSSITFPAISALVSRNAESDQQGVAQGIITGIRGLCNGLGPALYGFIFYMFHVELTELGPKLNSNNVPLQGAVIPGPPFLFGACIVLMSFLVALFIPEYSKASGVQKHSNSSSGSLTNTPERGSDEDIEPLLQDSSIWELSSFEEPGNQCTEL

SEQ ID NO: 41080 - protein, 102 aa, Artificial Sequence
  Synthetic polypeptide
GWRLKPSLGWRELKLECQPNSVSGPGKLVLEAWPLLSRAPARLRSLLRTARTAPVVWLMWSRSQVTTKSQSSSTRNTFPTAPSWCLWLLRLATPAASLFLAF

SEQ ID NO: 41081 - protein, 106 aa, Artificial Sequence
  Synthetic polypeptide
GWRLKPSLGWRELKLECQPNSVSGPGKLVLEAWPLLSRAPARLRSLLRTARTAPVVWLMWSRSQVTTKSQSSSTRNTFPTAPSWCLWLLRLATPAASLFLAFRSQG

SEQ ID NO: 41082 - protein, 8 aa, Artificial Sequence
  Synthetic polypeptide
SPRWGGES

SEQ ID NO: 41083 - protein, 110 aa, Artificial Sequence
  Synthetic polypeptide
SQLHGRLRLEVEALAGVERAEAGVPAEFSIWTREAGAGGLAIAVEGPSKAEISFEDRKDGSCGVAYVVQEPGDYEVSVKFNEEHIPDSPFVVPVASPSGDARRLTVSSLQ

SEQ ID NO: 41084 - protein, 416 aa, Artificial Sequence
  Synthetic polypeptide
SQLHGRLRLEVEALAGVERAEAGVPAEFSIWTREAGAGGLAIAVEGPSKAEISFEDRKDGSCGVAYVVQEPGDYEVSVKFNEEHIPDSPFVVPVASPSGDARRLTVSSLQESGLKVNQPASFAVSLNGAKGAIDAKVHSPSGALEECYVTEIDQDKYAVRFIPRENGVYLIDVKFNGTHIPGSPFKIRVGEPGHGGDPGLVSAYGAGLEGGVTGNPAEFVVNTSNAGAGALSVTIDGPSKVKMDCQECPEGYRVTYTPMAPGSYLISIKYGGPYHIGGSPFKAKVTGPRLVSNHSLHETSSVFVDSLTKATCAPQHGAPGPGPADASKVVAKGLGLSKAYVGQKSSFTVDCSKAGNNMLLVGVHGPRTPCEEILVKHVGSRLYSVSYLLKDKGEYTLVVKWGDEHIPGSPYRVVVP

SEQ ID NO: 41085 - protein, 19 aa, Artificial Sequence
  Synthetic polypeptide
CPFIYIYQVLPTRMEALSG

SEQ ID NO: 41086 - protein, 214 aa, Artificial Sequence
  Synthetic polypeptide
MSIYLHLSSSSYQNGSPFRVIQRSVGPASLSLLTFKVYAAPKKDSPPKNSVKVDELSLYSVPEGQSKYVEEARSQLEESISQLRHYCEPYTTWCQETYSQTKPKMQSLVQWGLDSYDYLQNAPPGFFPRLGVIGFAGLIGLLLARGSKIKKLVYPPGFMGLAASLYYPQQAIVFAQVSGERLYDWGLRGYIVIEDLWKENFQKPGNVKNSPGTK

SEQ ID NO: 41087 - protein, 130 aa, Artificial Sequence
  Synthetic polypeptide
MSIYLHLSSSSYQNGSPFRVIQRSVGPASLSLLTFKVYAAPKKDSPPKNSVKVDELSLYSVPEGQSKYVEEARSQLEESISQLRHYCEPYTTWCQTAMTISKMHLLDFFRDLVLLVLLALLDSFWLEVQK

SEQ ID NO: 41088 - protein, 195 aa, Artificial Sequence
  Synthetic polypeptide
MSIYLHLSSSSYQNGSPFRVIQRSVGPASLSLLTFKVYAAPKKDSPPKNSVKVDELSLYSVPEGQSKYVEEARSQLEESISQLRHYCEPYTTWCQTAMTISKMHLLFFPRLGVIGFAGLIGLLLARGSKIKKLVYPPGFMGLAASLYYPQQAIVFAQVSGERLYDWGLRGYIVIEDLWKENFQKPGNVKNSPGTK

SEQ ID NO: 41089 - protein, 52 aa, Artificial Sequence
  Synthetic polypeptide
VHLFTSIKFFLPEWKPFQGNSEVRGASQPELAHLQSLCSTKKGLTSQKFREG

SEQ ID NO: 41090 - protein, 8 aa, Artificial Sequence
  Synthetic polypeptide
ENRNSAVC

SEQ ID NO: 41091 - protein, 1376 aa, Artificial Sequence
  Synthetic polypeptide
INRKIEIVQFASRTRQLFVRLLALVKWANNAGKVEKCAMISSFLDQQAILFVDTADRLASLARDALVHARLPSFAIPYAIDVLTTGSYPRLPTCIRDKIIPPDPITKIEKQATLHQLNQILRHRLVTTDLPPQLANLTVANGRVKFRVEGEFEATLTVMGDDPDVPWRLLKLEILVEDKETGDGRALVHSMQISFIHQLVQSRLFADEKPLQDMYNCLHSFCLSLQLEVLHSQTLMLIRERWGDLVQVERYHAGKCLSLSVWNQQVLGRKTGTASVHKVTIKIDENDVSKPLQIFHDPPLPASDSKLVERAMKIDHLSIEKLLIDSVHARAHQKLQELKAILRGFNANENSSIETALPALVVPILEPCGNSECLHIFVDLHSGMFQLMLYGLDQATLDDMEKSVNDDMKRIIPWIQQLKFWLGQQRCKQSIKHLPTISSETLQLSNYSTHPIGNLSKNKLFIKLTRLPQYYIVVEMLEVPNKPTQLSYKYYFMSVNAADREDSPAMALLLQQFKENIQDLVFRTKTGKQTRTNAKRKLSDDPCPVESKKTKRAGEMCAFNKVLAHFVAMCDTNMPFVGLRLELSNLEIPHQGVQVEGDGFSHAIRLLKIPPCKGITEETQKALDRSLLDCTFRLQGRNNRTWVAELVFANCPLNGTSTREQGPSRHVYLTYENLLSEPVGGRKVVEMFLNDWNSIARLYECVLEFARSLPDIPAHLNIFSEVRVYNYRKLILCYGTTKGSSISIQWNSIHQKFHISLGTVGPNSGCSNCHNTILHQLQEMFNKTPNVVQLLQVLFDTQAPLNAINKLPTVPMLGLTQRTNTAYQCFSILPQSSTHIRLAFRNMYCIDIYCRSRGVVAIRDGAYSLFDNSKLVEGFYPAPGLKTFLNMFVDSNQDARRRSVNEDDNPPSPIGGDMMDSLISQLQPPPQQQPFPKQPGTSGAYPLTSPPTSYHSTVNQSPSMMHTQSPGNLHAASSPSGALRAPSPASFVPTPPPSSHGISIGPGASFASPHGTLDPSSPYTMVSPSGRAGNWPGSPQVSGPSPAARMPGMSPANPSLHSPVPDASHSPRAGTSSQTMPTNMPPPRKLPQRSWAASIPTILTHSALNILLLPSPTPGLVPGLAGSYLCSPLERFLGSVIMRRHLQRIIQQETLQLINSNEPGVIMFKTDALKCRVALSPKTNQTLQLKVTPENAGQWKPDELQVLEKFFETRVAGPPFKANTLIAFTKLLGAPTHILRDCVHIMKLELFPDQATQLKWNVQFCLTIPPSAPPIAPPGTPAVVLKSKMLFFLQLTQKTSVPPQEPVSIIVPIIYDMASGTTQQADIPRQQNSSVAAPMMVSNILKRFAEMNPPRQGECTIFAAVRDLMANLTLPPGGRP

SEQ ID NO: 41092 - protein, 4 aa, Artificial Sequence
  Synthetic polypeptide
LIGK

SEQ ID NO: 41093 - protein, 22 aa, Artificial Sequence
  Synthetic polypeptide
HNRDPKGGNMPGPTDCVRESSW

SEQ ID NO: 41094 - protein, 35 aa, Artificial Sequence
  Synthetic polypeptide
QQGPKRGEHAWTHRLRERKQLVIYEEISDPEEDDE

SEQ ID NO: 41095 - protein, 16 aa, Artificial Sequence
  Synthetic polypeptide
TTGTQKGGTCLDPQTA

SEQ ID NO: 41096 - protein, 43 aa, Artificial Sequence
  Synthetic polypeptide
MEWAARSLGLGSTLLLTSFSFSLDLHVSFCKMVLPIAAGEEER

SEQ ID NO: 41097 - protein, 8 aa, Artificial Sequence
  Synthetic polypeptide
NGASHCCR

SEQ ID NO: 41098 - protein, 1121 aa, Artificial Sequence
  Synthetic polypeptide
VWSGQPGVWVWAPLCSLLHFPFLWTSMCLSVKWCFPLLQVKKNAEAEAKRACEWLQATGFPQYVQLFEEGSFPLDIGSVKKNHGFLDEDSLGALCRRLMTLNNCASMKLEVHFQSKQNEDSEEEEQCTISSHWAFQQESKCWSPMGSSDLLAPPSPGLPATSSCESVLTELSATSLPVITVSLPPEPADLPLPGRAPSSSDRPLLSPTQGQEGPQDKAKKRHRNRSFLKHLESLRRKEKSGSQQAEPKHSPATSEKVSKASSFRSCRGFLSAGFYRAKNWAATSAGGSGANTRKAWEAWPVASFRHPQWTHRGDCLVHVPGDHKPGTFPRSLSIESLCPEDGHRLADWQPGRRWGCEGRRGSCGSTGSHASTYDNLPELYPAEPVMVGAEAEDEDDEESGGSYAHLDDILQHVWGLQQRVELWSRAMYPDLGPGDEEEEEATSSVEIATVEVKCQAEALSQMEVPAHGESPAWAQAEVQPAVLAPAQAPAEAEPVAQEEAEAPAPAPAPAPAQDSEQEAHSGGEPTFASSLSVEEGHSISDTVASSSELDSSGNSMNEAEAAGPLAGLQASMPRERRDSGVGASLTRPCRKLRWHSFQNSHRPSLNSESLEINRQFAGQINLLHKGSLLRLTAFMEKYTVPHKQGWVWSMPKFMRRNKTPDYRGQHVFGVPPLIHVQRTGQPLPQSIQQAMRYLRSQCLDQVGIFRKSGVKSRIQNLRQMNETSPDNVCYEGQSAYDVADLLKQYFRDLPEPIFTSKLTTTFLQIYQLLPKDQWLAAAQAATLLLPDENREVLQTLLYFLSDIASAEENQMTAGNLAVCLAPSIFHLNVSKKDSPSPRIKSKRSLIGRPGPRDLSDNMAATQGLSHMISDCKKLFQVPQDMVLQLCSSYSAAELSPPGPALAELRQAQAAGVSLSLYMEENIQDLLRDAAERFKGWMSVPGPQHTELACRKAPDGHPLRLWKASTEVAAPPAVVLHRVLRERALWDEDLLRAQVLEALMPGVELYHYVTDSMAPHPCRDFVVLRMWRSDLPRGGCLLVSQSLDPEQPVPESGVRALMLTSQYLMEPCGLGRSRLTHICRADLRGRSPDWYNKVFGHLCAMEVAKIRDSFPTLQAAGPETKL

SEQ ID NO: 41099 - protein, 70 aa, Artificial Sequence
  Synthetic polypeptide
VWSGQPGVWVWAPLCSLLHFPFLWTSMCLSVKWCFPLLQVKKNAEAEAKRACEWLQATGFPQYVQLFEGG
